(19) United States
(12) Patent Application Publication
(10) Pub. No.: US 2016/0326540 A1
(43) Pub. Date: Nov. 10, 2016

(54) Methods and Compositions Employing a Sulfonylurea-Dependent Stabilization Domain

(71) Applicant: PIONEER HI-BRED INTERNATIONAL, INC., Johnston, IA (US)

(72) Inventor: Kevin E. McBride, Davis, CA (US)

(21) Appl. No.: 14/775,575

(22) PCT Filed: Mar. 11, 2014
(86) PCT No.: PCT/US2014/023573

§ 371 Date: Sep. 11, 2015

Related U.S. Application Data
(60) Provisional application No. 61/776,124, filed on Mar. 11, 2013.

(51) Int. Cl. C12N 15/82; C07K 2/00; C12P 21/00

(52) U.S. Cl. CPC C12N 15/8257; C12P 21/00; C07K 2/00; C07K 2319/31; C07K 2319/92

(57) ABSTRACT

Methods and compositions are provided which employ polypeptides having a SU-dependent stabilization domain, and nucleotide sequences encoding the same. Such SU-dependent stabilization domains can be employed a part of a fusion protein comprising a polypeptide of interest. The presence of the SU-dependent stabilization domain in such a fusion protein serves as a method of modulating the level of the protein of interest through the presence of or the absence of a SU ligand. Further provided are methods and compositions employing the SU-dependent stabilization domain in a SuR or revSuR. Such polypeptides can be employed in combination with a chemical-gene switch system to allow for a sophisticated level of transcriptional control.

### CROSS-REFERENCE TO RELATED PATENT APPLICATIONS

[0001] This present application is a National Phase Under 35 U.S.C. §371 of PCT/US2014/023573 filed in the Patent Cooperation Treaty U.S. Receiving Office on Mar. 11, 2014, which claims the priority of and the benefit of the filing dated of U.S. Provisional Patent Application Ser. No. 61/776,124, filed Mar. 11, 2013, the entire contents of which are herein incorporated by reference.

### REFERENCE TO SEQUENCE LISTING SUBMITTED ELECTRONICALLY

[0002] The Sequence Listing submitted Jul. 13, 2016, as a text file named 36446_0070U2_July_updated_Sequence_Listing.txt, created on Jul. 11, 2016, and having a size of 2,375,358 bytes is hereby incorporated by reference pursuant to 37 C.F.R. §1.52 (e)(5).

### FIELD OF THE INVENTION

[0003] The invention relates to the field of molecular biology, more particularly to the regulation of gene expression.

### BACKGROUND

[0004] Chemical based control of transcription in plants with sulfonylurea (SU) herbicides via a modified tet-repressor based mechanism has been demonstrated (US20110294216). This strategy relies on repression/de-repression of fully functional promoters having embedded tet operator sequences thru co-expression of conditional repressor proteins (Gatz et al. (1988) PNAS 85:1394-1397; Frohberg et al. (1991) PNAS 88:10470-10474; Gatz et al. (1992) The Plant Journal 2:397-404; Yao et al. (1998) Human Gene Therapy 9:1939-1950), yet could be modified to create a SU controlled transcriptional activator acting on a minimal promoter with upstream tet operators (Gossen et al. (1995) Science 268:1766-1769).

[0005] Alternative methods of SU dependent regulation are needed to produce systems that can, if desired, reduce genetic complexity to one expression cassette instead of two (transcriptional regulation requires one cassette for the target gene and one cassette for the transcriptional activator/repressor) and possibly enable a quicker response to ligand. One method to accomplish this is to regulate the stability of any protein of interest by fusion to chemically responsive stability tags (A general chemical method to regulate protein stability in the mammalian central nervous system. Iwamoto, M. et al. (2010) Chemistry and Biology 17:981-988; also see ‘ProteoTunef’—Clontech). Such methods and compositions can find use either alone or in combination with other gene-chemical switch systems to enhance regulation of gene expression.

### SUMMARY

[0006] Methods and compositions are provided which employ polypeptides having a SU-dependent stabilization domain, and nucleotide sequences encoding the same. Such SU stabilization domains can be employed as part of a fusion protein comprising a polypeptide of interest. The presence of the SU-dependent stabilization domain in such a fusion protein serves as a method of modulating the level of the protein of interest through the presence of or the absence of a SU ligand.

[0007] Further provided are methods and compositions employing the SU-dependent stabilization domain in a SU chemically-regulated transcriptional activator, such as, SuR or a SU chemically-regulated reverse transcriptional repressor (revSuR) fused to a transcriptional activation domain. Such polypeptides can be employed in combination with a chemical-gene switch system to allow for a sophisticated level of transcriptional control.

### BRIEF DESCRIPTION OF DRAWINGS

[0008] FIG. 1 provides a schematic illustrating how ligand binding rescues stability of the fusion protein comprising the SU-dependent stabilization domain and the polypeptide of interest.

[0009] FIG. 2 provides a schematic for testing conditional stability of wild type and mutant TetR::GFP fusion proteins in Saccharomyces cereviseae.

[0010] FIG. 3 graphically shows that destabilization mutations in TetR have a greater effect on differential stability+/−anhydrotetracycline.

[0011] FIG. 4 provides a schematic of the constructs that compare Tet and SU repressors for ligand gated stability in Saccharomyces cereviseae.

[0012] FIG. 5 provides quantitative GFP fluorescence+/−sulfonylurea or anhydrotetracycline ligands in Saccharomyces cereviseae.

[0013] FIG. 6 provides the ratio of GFP::Repressor fusion protein accumulation in the presence vs. absence of anhydrotetracycline or sulfonylurea treatment in Saccharomyces cereviseae.

[0014] FIG. 7 provides anhydrotetracycline and sulfonylurea dose response data in Saccharomyces cereviseae.

[0015] FIG. 8 provides demonstration of constitutive behavior of repressors with DNA binding domain mutation L17G in E. coli B-galactosidase assays.

[0016] FIG. 9 provides a demonstration of ligand dependent EsR^{L17G}::GFP accumulation in transgenic tobacco. The construct pHD2033-2036 is set forth in SEQ ID NO: 2111. Within SEQ ID NO: 2111, the promoter comprising 35S::3×Op is between nucleotides 177 to 623, the ESR (L19G) coding region is between nucleotides 699 to 1319, the coding region for GFP is between nucleotides 1326 to 2039, the coding region of HRA is between nucleotides 4738 to 6708, and the SAMS promoter is between nucleotides 3428-4737.

[0017] FIG. 10 provides a demonstration of compatibility between the protein stability and transcriptional switch mechanisms.

[0018] The construct pHD2037-2040 is set forth in SEQ ID NO: 2112. Within SEQ ID NO: 2112, the promoter comprising 35S::3×Op is between nucleotides 177 to 623, the ESR (L19G) coding region is between nucleotides 699 to 1319, the coding region for GFP is between nucleotides 1326 to 2039, the promoter comprising g35S::3×Op is between nucleotides 3253-3699, the coding region of ESR(L13) is between nucleotides 3775 to 4395, the SAMS promoter is between nucleotides 5462 to 6771 and the HRA coding region is between nucleotides 6772 to 8742.

[0019] FIG. 11 provides a summary of source diversity, library design, hit diversity, and population bias for several generations of sulfonylurea repressor shuffling libraries L1, L2, L4, L6, L7 and resulting sequence incorporation biases. A dash (“-”) indicates no amino acid diversity introduced at that position in that library. An X indicates that the library oligonucleotides were designed to introduce complete amino acid diversity (any of 20 amino acids) at that position in that library. Residues in bold indicate bias during selection with larger font size indicating a greater degree of bias in the selected population. Residues in parentheses indicate selected mutations. The phylogenetic diversity pool was derived from a broad family of 34 tetracycline repressor sequences.

[0020] FIG. 12 provides a summary of source diversity, library design, hit diversity, and population bias for several generations of sulfonylurea repressor shuffling libraries Description of libraries L10, L11, L12, L13, L15 and resulting sequence incorporation biases. A dash (“-”) indicates no amino acid diversity introduced at that position in that library. An X indicates that the library oligonucleotides were designed to introduce complete amino acid diversity (any of 20 amino acids) at that position in that library. Residues in bold indicate bias during selection with larger font size indicating a greater degree of bias in the selected population. Residues in parentheses indicate selected mutations.

[0021] FIG. 13 provides B-galactosidase assays of hits from saturation mutagenesis at position D178 in CsR.

[0022] FIG. 14 shows the proximity of residues L131 and T134 to the sulfonylurea differentiating side groups of Chlorsulfuron bound CsR(CsL4.2-20).

[0023] FIG. 15 shows the relative position and orientations of the bound ligands tetracycline-Mg²⁺ (black), chlorsulfuron (gray with black outline), and ethametsulfuron (white with black outline), following superposition of their respective repressor structures. The herbicides occupy the same overall binding pocket, but have dramatically different conformations within it.

[0024] FIG. 16 shows the ethametsulfuron (white carbons) binding pocket from the ethametsulfuron repressor EsR(L11-C6) crystal structure. The two subunits of the dimeric repressor are shown in diagonal stripes patter, and cross hatch pattern, respectively. Straight, dashed black lines represent hydrogen bonds or ionic interactions, while semicircular dashes represent non-polar interactions. The degree of hydrophobic and hydrogen bonding interactions between TetR/Tet and EsR/Es are similar, but the precise interactions are quite different.

[0025] FIG. 17 shows interactions between ethametsulfuron (black) and the ethametsulfuron repressor EsR(L11-C6) in the crystal structure. The two subunits of the dimeric repressor are colored white (with black outline) and gray (with black outline), respectively. Straight, dashed black lines represent hydrogen bonds or ionic interactions, while semicircular dashes represent non-polar interactions.

[0026] FIG. 18 shows the chlorsulfuron (white carbons) binding pocket from the chlorsulfuron repressor CsR(L4.2-20) crystal structure. The two subunits of the dimeric repressor are shown in diagonal stripes pattern, and cross hatch pattern, respectively. Straight, dashed black lines represent hydrogen bonds or ionic interactions.

[0027] FIG. 19 shows interactions between chlorsulfuron (black) and the chlorsulfuron repressor CsR(L4.2-20) in the crystal structure. The two subunits of the dimeric repressor are colored white (with black outline) and gray (with black outline), respectively. Straight, dashed black lines represent hydrogen bonds or ionic interactions, while semicircular dashes represent non-polar interactions.6

### DETAILED DESCRIPTION

[0028] The present inventions now will be described more fully hereinafter with reference to the accompanying drawings, in which some, but not all embodiments of the inventions are shown. Indeed, these inventions may be embodied in many different forms and should not be construed as limited to the embodiments set forth herein; rather, these embodiments are provided so that this disclosure will satisfy applicable legal requirements. Like numbers refer to like elements throughout.

[0029] Many modifications and other embodiments of the inventions set forth herein will come to mind to one skilled in the art to which these inventions pertain having the benefit of the teachings presented in the foregoing descriptions and the associated drawings. Therefore, it is to be understood that the inventions are not to be limited to the specific embodiments disclosed and that modifications and other embodiments are intended to be included within the scope of the appended claims. Although specific terms are employed herein, they are used in a generic and descriptive sense only and not for purposes of limitation.

### I. Sulfonylurea-Dependent Stabilization Domains

[0030] Polypeptides having a sulfonylurea (SU)-dependent stabilization domain are provided. As used herein, a polypeptide having a SU-dependent stabilization domain comprises a polypeptide whose stability is influenced by the presence or the absence of an effective concentration of a SU ligand. In specific embodiments, the polypeptide having the SU-dependent stabilization domain will have increased protein stability in the presence of an effective amount of the SU.

[0031] Protein stability can be assayed for in many ways, including, for example measuring for a modulation in the concentration and/or activity of the polypeptide of interest. In general, an increase in protein stability can be measured by an increase in the concentration and/or activity of the protein by at least 1%, 5%, 10%, 20%, 30%, 40%, 50%, 60%, 70%, 80%, or 90% relative to an appropriate control that was not exposed to the effective amount of the SU ligand. Alternatively, an increase in protein stability can be measured by an increase in the concentration and/or activity of the protein by at least 1 fold, 2 fold, 3 fold, 5 fold, 10 fold, 20 fold, 30 fold, 40 fold, 50 fold, 60 fold, 70 fold, 80 fold, 90 fold, 100 fold or greater relative to an appropriate control that was not exposed to the effective amount of the SU ligand.

[0032] In specific embodiments, the SU-dependent stabilization domain can comprise a ligand binding domain of a SU chemically-regulated transcriptional regulator, wherein the ligand binding domain comprises at least one destabilization mutation. As used herein, a “destabilization mutation” comprises an alteration in the amino acid sequence that results in the polypeptide having the alteration to have an increased stability in the presence of an effective concentration of a SU ligand, when compared to the stability of the polypeptide lacking the mutation.

[0033] Various SU chemically-regulated transcriptional regulators are known. See, for example WO2010/062518 and U.S. application Ser. No. 13/086,765, filed Apr. 14, 2012, each of which is herein incorporated by reference in their entirety. Non-limiting examples of SU chemically-regulated transcriptional regulators are set forth in SEQ ID NO:3-419, 863-870, 884-889, and 1193-1568 and 1949-2110 and their ligand binding domain is found at amino acids 47-207 of each of these SEQ ID NOs. Thus, in one embodiment, a SU-dependent stabilization domain comprises a ligand binding domain from a SU chemically-regulated transcriptional regulator, wherein the ligand binding domain has at least 1, 2, 3, 4, 5, 6 or more destabilization mutations.

[0034] Thus, in some embodiments, the SU-dependent stabilization domain comprising the ligand binding domain of a SU chemically-regulated transcriptional regulator comprises at least 70%, 75%, 80%, 85%, 90%, 91%, 92%, 93%, 94%, 95%, 96%, 97%, 98%, or 99% sequence identity to the ligand binding domain of an amino acid sequence set forth in any one of SEQ ID NO:3-419, 863-870, 884-889 and/or 1193-1568 and 1949-2110, wherein said polypeptide further comprises at least one destabilization mutation. In some examples the global alignment method uses the GAP algorithm with default parameters for an amino acid sequence % identity and % similarity using GAP Weight of 8 and Length Weight of 2, and the BLOSUM62 scoring matrix.

[0035] Non-limiting examples of destabilization mutations that can be made in the ligand binding domain of a SU chemically-regulated transcriptional regulator include, for example, altering the glycine as position 96 to arginine (G96R) with the amino acid position being referenced being relative to the amino acid sequence of L13-2-46(B10) the SU chemically regulated transcriptional repressor set forth in SEQ ID NO: 405. Also, double mutant arginine 94 to proline combined with valine 99 to glutamate (R94P/V99E) can be included in this class (Resch M, et al. (2008) A protein functional leap: How a single mutation reverses the function of the transcription regulator TetR. Nucleic Acids Res 36:4390-440, which is herein incorporated by reference in its entirety). Thus, when one or more of these destabilization mutations are present in the ligand binding domain of the SU chemically-regulated transcriptional regulator, the polypeptide has a decreased stability in the absence of the SU ligand and an increased stability in the presence of an effective amount of the SU ligand.

[0036] In other embodiments, the SU-dependent stabilization domain can comprise a DNA binding domain of a SU chemically-regulated transcriptional regulator, wherein the DNA binding domain comprises at least one destabilization mutation. Various SU chemically-regulated transcriptional regulators are known. See, for example WO2010/062518 and U.S. application Ser. No. 13/086,765, all of which are herein incorporated by reference. Non-limiting examples of SU chemically-regulated transcriptional regulators are set forth in SEQ ID NO:3-419, 863-870, 884-889, 1193-1568 and/or 1949-2110 and/or and their DNA binding domain is found at amino acids 1-46 of each of these SEQ ID NOs. Thus, in one embodiment, a SU-dependent stabilization domain comprises a DNA binding domain from a SU chemically-regulated transcriptional regulator, wherein the DNA binding domain has at least 1, 2, 3, 4, 5, 6 or more destabilization mutations.

[0037] Thus, in some embodiments, the SU-dependent stabilization domain comprising the DNA binding domain of the SU chemically-regulated transcriptional regulator comprises at least 70%, 75%, 80%, 85%, 90%, 91%, 92%, 93%, 94%, 95%, 96%, 97%, 98%, or 99% sequence identity to the DNA binding domain of an amino acid sequences sequence set forth in any one of SEQ ID NO:3-419, 863-870, 884-889, 1193-1568 and/or 1949-2110 wherein said polypeptide further comprises at least one destabilization mutation. In some examples the global alignment method uses the GAP algorithm with default parameters for an amino acid sequence % identity and % similarity using GAP Weight of 8 and Length Weight of 2, and the BLOSUM62 scoring matrix.

[0038] Non-limiting examples of destabilization mutations that can be made in the DNA binding domain of a SU chemically-regulated transcriptional repressor include, for example, altering the leucine as position 17 to glycine (L17G), the isoleucine at position 22 to aspartic acid (I22D), and/or altering the leucine at position 30 to aspartic acid (L30D) or leucine at position 34 to aspartic acid (L34D). See, Reichheld S E, Davidson A R (2006) Two-way interdomain signal transduction in tetracycline repressor. J Mol Biol 361:382-389, which is herein incorporated by reference in its entirety). The amino acid position being referenced is relative to the amino acid sequence of the SU chemically regulated transcriptional repressor set forth in SEQ ID NO: 405. Thus, when one or more of these destabilization mutations are present in the DNA binding domain of the SU chemically-regulated transcriptional regulator, the polypeptide has a decreased stability in the absence of the SU ligand and an increased stability in the presence of an effective amount of the SU ligand.

[0039] In other embodiments, the SU-dependent stabilization domain comprises both the DNA binding domain and the SU ligand binding domain of the SU chemically-regulated transcriptional regulator. As such, any combination of the destabilization mutations of the DNA binding domain and/or the ligand binding domain can be used to produce a polypeptide having a SU-dependent stabilization domain. In specific embodiments, a SU dependent stabilization domain comprises a combination of any one of the L17G, I22D and/or G96R mutation.

[0040] Thus, in some embodiments, the SU-dependent stabilization domain comprises a polypeptide having at least 70%, 75%, 80%, 85%, 90%, 91%, 92%, 93%, 94%, 95%, 96%, 97%, 98%, or 99% sequence identity to the full length SU chemically-regulated transcriptional regulator set forth in any one of SEQ ID NO:3-419, 863-870, 884-889, 1193-1568 and/or 1949-2110, wherein said polypeptide further comprises at least one destabilization mutation and thus increases the stability of the polypeptide in the presence of an effective concentration of the SU ligand. When a SU chemically-regulated transcriptional regulator is employed as a SU-dependent stabilization domain, the SU chemically-regulated transcriptional regulator can continue to retain transcriptional regulatory activity, and in some embodiments, the transcriptional regulatory activity is not retained. In some examples the global alignment method uses the GAP algorithm with default parameters for an amino acid sequence % identity and % similarity using GAP Weight of 8 and Length Weight of 2, and the BLOSUM62 scoring matrix.

[0041] In non-limiting embodiments, the SU-dependent stabilization domain can have an equilibrium binding constant for a sulfonylurea compound greater than 0.1 nM and less than 10 μM. In some examples, the SU-dependent stabilization domain has an equilibrium binding constant for a sulfonylurea compound of at least 0.1 nM, 0.5 nM, 1 nM, 10 nM, 50 nM, 100 nM, 250 nM, 500 nM, 750 nM, 1 μM, 5 μM, 7 μM but less than 10 μM. In other examples, the SU-dependent stabilization domain has an equilibrium binding constant for a sulfonylurea compound of at least 0.1 nM, 0.5 nM, 1 nM, 10 nM, 50 nM, 100 nM, 250 nM, 500 nM, 750 nM but less than 1 μM. In some embodiments, the SU-dependent stabilization domain has an equilibrium binding constant for a sulfonylurea compound greater than 0 nM, but less than 0.1 nM, 0.5 nM, 1 nM, 10 nM, 50 nM, 100 nM, 250 nM, 500 nM, 750 nM, 1 μM, 5 μM, 7 μM or 10 μM. In some examples, the sulfonylurea compound is a chlorsulfuron, an ethametsulfuron, a metsulfuron, a sulfometuron, a tribenuron, a chlorimuron, a nicosulfuron, a rimsulfuron and/or a thifensulfuron.

[0042] i. Reverse SU-Chemically Regulated Transcriptional Repressors (revSuRs) Having at Least One Destabilization Mutation

[0043] In some embodiments, the SU-dependent stabilization domain comprises a reverse SU chemically-regulated transcription repressor (revSuR), having at least one destabilization domain, such that the destabilization mutation increases the stability of the polypeptide in the presence of an effective concentration of the SU ligand.

[0044] As used herein, a “reverse SU chemically-regulated transcriptional repressor” or “revSuR” comprises a polypeptide that contains a DNA binding domain and a SU ligand binding domain. In the absence of the SU ligand, the revSuR is both unstable as well as unable to bind an operator of a ligand responsive promoter and repress the activity of the promoter, and thereby allows for the expression of the polynucleotide operably linked to the promoter. In the presence of an effective concentration of the SU chemical ligand, the revSuR is stabilized. The ligand-bound revSuR can then bind the operator of a ligand responsive promoter and repress transcription. Variants and fragments of a revSuR chemically-regulated transcriptional repressor will retain this activity, and thereby repress transcription in the presence of the SU ligand.

[0045] Non-limiting examples of revSuRs are set forth in WO2010/062518 and U.S. application Ser. No. 13/086,765, herein incorporated by reference. Also, SEQ ID NO:412-419 or active variants and fragments thereof comprise revSuR polynucleotides and the polypeptides they encode. These various revSuRs can be altered to contain a SU-dependent stabilization domain comprising at least one destabilization mutation, such that the revSuR is unstable in the absence of the effective amount of the SU ligand. As such, further provided are polynucleotides and polypeptides comprising any one of SEQ ID NO:412-419 or a sequence having at least 70%, 75%, 80%, 85%, 90%, 91%, 92%, 93%, 94%, 95%, 96%, 97%, 98% or 99% sequence identity to any one of SEQ ID NOS: 412-419, wherein said sequence comprises one or more destabilization mutations. revSuR polypeptides or active variants thereof are thus unstable in the absence of an effective amount of SU ligand and, in the presence of the an effective amount of SU ligand, the revSuR decreases transcriptional activation activity.

[0046] In some examples the rev(SuR) polypeptide is selected from the group consisting of SEQ ID NO:412-419 and further comprises at least one destabilization mutation, and the sulfonylurea compound is selected from the group consisting of a chlorsulfuron, an ethametsulfuron, a metsulfuron, a sulfometuron, a tribenuron, a chlorimuron, a nicosulfuron, a rimsulfuron and a thifensulfuron.

[0047] In some examples, the rev SuR having at least one destabilization mutation has an equilibrium binding constant for an operator sequence greater than 0.1 nM and less than 10 μM. In some examples the rev SuR having at least one destabilization mutation has an equilibrium binding constant for an operator sequence of at least 0.1 nM, 0.5 nM, 1 nM, 10 nM, 50 nM, 100 nM, 250 nM, 500 nM, 750 nM, 1 μM, 5 μM, 7 μM but less than 10 μM. In some examples, the revSuR having at least one destabilization mutation has an equilibrium binding constant for an operator sequence of at least 0.1 nM, 0.5 nM, 1 nM, 10 nM, 50 nM, 100 nM, 250 nM, 500 nM, 750 nM but less than 1 μM. In some examples the revSuR having at least one destabilization mutation has an equilibrium binding constant for an operator sequence greater than 0 nM, but less than 0.1 nM, 0.5 nM, 1 nM, 10 nM, 50 nM, 100 nM, 250 nM, 500 nM, 750 nM, 1 μM, 5 μM, 7 μM or 10 μM. In some examples, the operator sequence is a Tet operator sequence. In some examples, the Tet operator sequence is a TetR(A) operator sequence, a TetR(B) operator sequence, a TetR(D) operator sequence, TetR(E) operator sequence, a TetR(H) operator sequence, or a functional derivative thereof.

[0048] In specific embodiments, a transcriptional activation domain (denoted herein as TAD or TA) can be fused in frame to the revSuR and thereby influence the activity of the revSuR. In such instances, the binding of the revSuR-TAD to the operator will result in transcriptional activation of the operably linked sequence of interest. Employing such transcriptional activation domains is known. For example, the VP16 transcriptional domain can be operably linked to the revSuR sequence and thereby allow for transcriptional activation in the presence of the SU ligand. See, for example, Gossen et al. (1995) Science 268:1766-1769. A revSuR-TAD having at least one destabilization mutation is unstable in the absence of an effective concentration of a SU ligand. In the presence of an effective concentration of an SU ligand, the revSuR-TAD having the at least one destabilization mutation is stable and the polypeptide can then increase transcription from a cognate ligand responsive promoter.

[0049] In some examples, the rev(SuR)-TAD polypeptide comprises a revSuR selected from the group consisting of SEQ ID NO:412-419 and further comprises at least one destabilization mutation and a TAD, and the sulfonylurea compound is selected from the group consisting of a chlorsulfuron, an ethametsulfuron, a metsulfuron, a sulfometuron, a tribenuron, a chlorimuron, a nicosulfuron, a rimsulfuron and a thifensulfuron.

[0050] Thus, a revSuR can be designed to either activate transcription or repress transcription. By “activate transcription” is intended an increase of transcription of a given polynucleotide. An increase in transcription can comprise any statistically significant increase including, an increase of at least 1%, 5%, 10%, 20%, 30%, 40%, 50%, 60%, 70%, 80%, 90%, 100%, 150%, 200% or greater or at least a 1, 2, 3, 4, 5, 6, 7, 8, 9, or 10 fold increase. A decrease in transcription can comprise any statistically significant decrease including, a decrease of at least 1%, 5%, 10%, 20%, 30%, 40%, 50%, 60%, 70%, 80%, 90%, 100%, 150%, 200% or greater or at least a 1, 2, 3, 4, 5, 6, 7, 8, 9, or 10 fold decrease.

### II. Recombinant Constructs Comprising the SU-Dependent Stabilization Domain

[0051] ii. Fusion Proteins Comprising a SU-Dependent Stabilization Domain Operably Linked to a Polypeptide of Interest

[0052] Polypeptides comprising a SU-dependent stabilization domain fused in frame to a polypeptide of interest are provided, as are the polynucleotides encoding the same. In such instances, the fusion protein would have an increased stability in the presence of an effective amount of the SU ligand and thereby show an increase in the level of the fusion protein. In the absence of the effective amount of the SU ligand, the fusion protein would be less stable and thereby result in a decreased level of the fusion protein.

[0053] Any SU-dependent stabilization domain can be employed in the fusion proteins and polynucleotides encoding the same, including, for example, the ligand binding domain of a SU chemically-regulated transcriptional regulator with at least one destabilization mutation, the DNA binding domain of a SU chemically-regulated transcriptional regulator with at least one destabilization mutation, a SuR having at least one destabilization mutation, a revSuR having at least one destabilization domain, or a revSuR-TAD having at least one destabilization domain. Each of these forms of SU-dependent stabilization domains are discussed in further detail elsewhere herein.

[0054] In general, the fusion protein comprising the SU-dependent stabilization domain may be fused in frame to: an enzyme involved in metabolism, biosynthesis and the like; a transcription factor for modulation of any phenotypic aspect of a cell or organism; a sequence specific nuclease designed for stimulating targeted mutagenesis, site specific integration and/or homologous recombination of donor DNA; or any other protein for which it is desired to regulate the steady state level of.

[0055] In one embodiment, the fusion protein comprising the SU-dependent stabilization domain fused in frame to a polypeptide of interest further comprises an intein. As used herein, an “intein” comprises a peptide that is excised from a polypeptide and the flanking “extein” regions of the intein are ligated together. When employed with a fusion protein disclosed herein, the intein is designed such that the flanking extein regions (i.e., the polypeptide of interest and the SU stabilization domain) are not rejoined. Thus, the intein retains cleavage activity, but has reduced ability or no ability to religate the extein sequences. Thus, the polypeptide of interest can be freed from the SU-dependent stabilization domain. In this regard there would be no adverse effect of having a fusion protein as it would be released from the union leaving the target protein in its native state. See, for example, Buskirk (2004) PNAS 101:10505-10510 and NEB Catalog #E6900S for TM PACT™-CN.

[0056] ii. Promoters for Expression of the Fusion Proteins Comprising the SU-Dependent Stabilization Domain

[0057] The polynucleotide encoding the fusion protein comprising the SU-dependent stabilization domain can be operably linked to a promoter that is active in any host cell of interest. In specific embodiments, the promoter is active in a plant. Various promoters can be employed and non-limiting examples are set forth elsewhere herein. Briefly, the fusion protein can be operably linked to a constitutive promoter, an inducible promoter, tissue-preferred promoter, or a ligand responsive promoter. In specific embodiments, the fusion protein comprising the SU-dependent stabilization domain is operably linked to a non-constitutive promoter, including, but not limited to, a tissue-preferred promoter, an inducible promoter, a ligand responsive promoter, a developmental stage preferred promoter, or a promoter having more than one of these properties. In some examples expression of the polynucleotide of interest is primarily regulated in roots, leaves, stems, flowers, silks, anthers, pollen, meristem, germline, seed, endosperm, embryos, or progeny.

[0058] When the fusion protein comprises a revSuR-TAD having at least one destabilization mutation fused to a polypeptide of interest, the polynucleotide encoding the same can be operably linked to a ligand responsive promoter, and thereby allowing the revSuR-TAD, in the presence of an effective amount of SU ligand, to increase its own expression. Thus, in specific embodiments, the fusion protein comprising the revSuR-TAD can be operably linked to a ligand responsive promoter comprising at least one, two, three or more operators (including a tet operator, such as that set forth in SEQ ID NO:848 or an active variant or fragment thereof) regulating expression of said repressor. The regulated promoter could be a repressible promoter regulated additionally by a non-destabilized SuR or a hybrid repressible-activatable promoter regulated by both a non-destabilized SuR as well as a destabilized revSuR-TAD. Non-limiting examples of ligand responsive promoters for expression of the chemically-regulated transcriptional repressor, include the ligand responsive promoters set forth in SEQ ID NO:885, 856, 857, 858, 859, or 860 or active variants and fragments thereof.

[0059] In another example the promoter may be both activated by revSuR-TAD in the presence of SU and repressed in the absence of SU by a co-expressed trans-dominant SuR-TR that recruits the histone deacetylase complex and induces transcriptional silence. In this strategy the SuR chosen for activation and the one chosen for repression would lack hetero-dimerization capacity (Sabine Freundlieb et al. (1999) J Gene Med. 1:4-12, which is herein incorporated by reference in its entirety).

[0060] In yet another example, the regulated promoter could be a hybrid repressible-activatable promoter regulated by both a non-destabilized SuR as well as a destabilized revSuR-TAD. In this case, there could be two sets of operators sequences: one upstream of the promoter acting to recruit revSuR-TA for promoter activation and then a second set of modified operators located in and around the TATA box and transcriptional start sites that would be bound only by an SuR mutated in the DNA binding domain to recognize these modified operators. The revSuR-TAD and SuR* would also have to be designed as to not heterodimerize as their co-expression would likely lead to non-functional activators and repressors. Previously it has been shown that tet operators mutated at positions 4 and 6 relative to the center of the dyad core disallow binding by TetR and that compensatory mutations in TetR re-enable binding and functional repression from these mutated operators. Co-expression of wildtype and mutated TetR repressors have been shown to independently regulate genes from wildtype and mutant operators (Gene regulation by tetracyclines: Constraints of resistance regulation in bacteria shape TetR for application in eukaryotes. Christian Berens and Wolfgang Hillen. Eur. J. Biochem. 270, 3109-3121 (2003)). Thus it may be possible to design a promoter for both activation and repression using the SuR system.

[0061] iii. Polypeptides of Interest

[0062] Any polypeptide of interest can be employed in the fusion proteins discussed above, as well as, the encoding polynucleotide sequence in the corresponding DNA construct. Such polypeptides of interest are discussed in detail elsewhere herein.

### III. The SU-Dependent Stabilization Domain in a Chemical Gene-Switch and Methods of Use

[0063] The polypeptide comprising the SU-dependent stabilization domain can further be employed in a chemical-gene switch system. The chemical-gene switch employing a SU-dependent stabilization domain comprises at least two components. The first component comprises a first recombinant construct comprising a first promoter operably linked to a SU chemically-regulated transcriptional regulator comprising a revSuR having a TAD, wherein the revSuR comprises a destabilization mutation. The second component comprises a second recombinant construct comprising a first ligand responsive promoter comprising at least 1, 2, 3, 4, 5, 6, 7, 8, 9 10 or more cognate operators for the revSuR operably linked to a polynucleotide of interest. In such a system, in the absence of an effective amount of the SU ligand, the revSuR is unstable and the polypeptide does not accumulate in the cell. As such, the polynucleotide of interest is transcribed at its base-line level. In the presence of an effective concentration of a SU ligand, the revSuR-TAD is stabilized and thus, an increase in the level of the revSuR-TAD occurs. The revSuR-TAD can then increase the level of transcription from the first ligand responsive promoter

[0064] As explained in further detail herein, the activity of the chemical-gene switch can be controlled by selecting the combination of elements used in the switch. These include, but are not limited to, the type of promoter operably linked to the revSuR-TAD having the destabilization mutations, the ligand responsive promoter operably linked to the polynucleotide of interest, the TAD operably linked to the revSuR, and the polynucleotide of interest. Further control is provided by selection, dosage, conditions, and/or timing of the application of the SU ligand.

[0065] i. Promoters for the Expression of the RevSuR-TAD Comprising the Destabilization Mutation

[0066] When employed in a chemical-gene switch, the polynucleotide encoding the revSuR-TAD comprising the at least one destabilization mutation is operably linked to a promoter that is active in a host cell of interest, including, for example, a plant cell. Various promoters can be employed and non-limiting examples are set forth elsewhere herein. Briefly, the polynucleotide encoding the revSuR-TAD comprising the at least one destabilization mutation can be operably linked to a constitutive promoter, an inducible promoter, a tissue-preferred promoter, or a ligand responsive promoter. In specific embodiments, the polynucleotide encoding the revSuR-TAD is operably linked to a non-constitutive promoter, including but not limited to a tissue-preferred promoter, an inducible promoter, a ligand responsive promoter, a developmental stage preferred promoter, or a promoter having more than one of these properties. In some examples expression of the polynucleotide encoding the revSuR-TAD is primarily regulated in roots, leaves, stems, flowers, silks, anthers, pollen, meristem, germline, seed, endosperm, embryos, or progeny.

[0067] In other embodiments, the revSuR-TAD having the at least one destabilization mutation can be operably linked to a ligand responsive promoter, thus allowing the chemically-regulated transcriptional repressor to auto-regulate its own expression. Thus, in specific embodiments, the polynucleotide encoding the revSuR-TAD can be operably linked to a ligand responsive promoter comprising at least one, two, three, four, five, six, seven, eight, nine, ten or more operators (including a tet operator, such as that set forth in SEQ ID NO:848 or an active variant or fragment thereof) regulating expression of the revSuR-TAD. Non-limiting ligand responsive promoters for expression of the revSuR-TAD, include the ligand responsive promoters set forth in SEQ ID NO:848, 885, 856, 857, 858, 859, or 860 or active variants and fragments thereof.

[0068] ii. Promoters for Expression of the Polynucleotide of Interest

[0069] In the chemical-gene switch system, the polynucleotide of interest is operably linked to a ligand responsive promoter active in the host cell or plant. Various ligand responsive promoters that can be used to express the polynucleotide of interest are discussed in detail elsewhere herein.

### IV. Polynucleotides/Polypeptides of Interest.

[0070] Any polynucleotide or polypeptide of interest either in the fusion protein comprising the SU stabilization domain or in the chemical-gene switch system can be employed in the various methods and compositions disclosed herein. In specific embodiments, expression of the polynucleotide of interest alters the phenotype and/or genotype of the plant. An altered genotype includes any heritable modification to any sequence in a plant genome. An altered phenotype includes any scenario wherein a cell, tissue, plant, and/or seed exhibits a characteristic or trait that distinguishes it from its unaltered state. Altered phenotypes included, but are not limited to, a different growth habit, altered flower color, altered relative maturity, altered yield, altered fertility, altered flowering time, altered disease tolerance, altered insect tolerance, altered herbicide tolerance, altered stress tolerance, altered water tolerance, altered drought tolerance, altered seed characteristics, altered morphology, altered agronomic characteristic, altered metabolism, altered gene expression profile, altered ploidy, altered crop quality, altered forage quality, altered silage quality, altered processing characteristics, and the like.

[0071] Polynucleotides of interest are reflective of the commercial markets and interests of those involved in the development of the crop. Crops and markets of interest change, and as developing nations open up world markets, new crops and technologies will emerge also. In addition, as our understanding of agronomic traits and characteristics such as yield and heterosis increase, the choice of genes for transformation will change accordingly. General categories of genes of interest include, for example, those genes involved in information, such as zinc fingers, those involved in communication, such as kinases, and those involved in housekeeping, such as heat shock proteins. More specific categories of transgenes, for example, include genes encoding important traits for agronomics, insect resistance, disease resistance, herbicide resistance, sterility, grain characteristics, and commercial products. Genes of interest include, generally, those involved in oil, starch, carbohydrate, or nutrient metabolism, as well as, those affecting kernel size, sucrose loading, and the like.

[0072] In still other embodiments, the polynucleotide of interest may be any sequence of interest, including but not limited to sequences encoding a polypeptide, encoding an mRNA, encoding an RNAi precursor, encoding an active RNAi agent, a miRNA, an antisense polynucleotide, a ribozyme, a fusion protein, a replicating vector, a screenable marker, and the like. Expression of the polynucleotide of interest may be used to induce expression of an encoding RNA and/or polypeptide, or conversely to suppress expression of an encoded RNA, RNA target sequence, and/or polypeptide. In specific examples, the polynucleotide sequence may a polynucleotide encoding a plant hormone, plant defense protein, a nutrient transport protein, a biotic association protein, a desirable input trait, a desirable output trait, a stress resistance gene, a disease/pathogen resistance gene, a male sterility, a developmental gene, a regulatory gene, a DNA repair gene, a transcriptional regulatory gene or any other polynucleotide and/or polypeptide of interest.

[0073] Agronomically important traits such as oil, starch, and protein content can be genetically altered in addition to using traditional breeding methods. Modifications include increasing content of oleic acid, saturated and unsaturated oils, increasing levels of lysine and sulfur, providing essential amino acids, and also modification of starch. Hordothionin protein modifications are described in U.S. Pat. Nos. 5,703,049, 5,885,801, 5,885,802, and 5,990,389, herein incorporated by reference. Another example is lysine and/or sulfur rich seed protein encoded by the soybean 2S albumin described in U.S. Pat. No. 5,850,016, and the chymotrypsin inhibitor from barley, described in Williamson et al. (1987) Eur. J. Biochem. 165:99-106, the disclosures of which are herein incorporated by reference.

[0074] Derivatives of the coding sequences can be made by site-directed mutagenesis to increase the level of preselected amino acids in the encoded polypeptide. For example, the gene encoding the barley high lysine polypeptide (BHL) is derived from barley chymotrypsin inhibitor, U.S. application Ser. No. 08/740,682, filed Nov. 1, 1996, and WO 98/20133, the disclosures of which are herein incorporated by reference. Other proteins include methionine-rich plant proteins such as from sunflower seed (Lilley et al. (1989) Proceedings of the World Congress on Vegetable Protein Utilization in Human Foods and Animal Feedstuffs, ed. Applewhite (American Oil Chemists Society, Champaign, Ill.), pp. 497-502; herein incorporated by reference); corn (Pedersen et al. (1986) J. Biol. Chem. 261:6279; Kirihara et al. (1988) Gene 71:359; both of which are herein incorporated by reference); and rice (Musumura et al. (1989) Plant Mol. Biol. 12:123, herein incorporated by reference). Other agronomically important genes encode latex, Floury 2, growth factors, seed storage factors, and transcription factors.

[0075] Insect resistance genes may encode resistance to pests that have great yield drag such as rootworm, cutworm, European Corn Borer, and the like. Such genes include, for example, Bacillus thuringiensis toxic protein genes (U.S. Pat. Nos. 5,366,892; 5,747,450; 5,736,514; 5,723,756; 5,593,881; and Geiser et al. (1986) Gene 48:109); and the like.

[0076] Genes encoding disease resistance traits include detoxification genes, such as against fumonosin (U.S. Pat. No. 5,792,931); avirulence (avr) and disease resistance (R) genes (Jones et al. (1994) Science 266:789; Martin et al. (1993) Science 262:1432; and Mindrinos et al. (1994) Cell 78:1089); and the like.

[0077] Herbicide resistance traits may include genes coding for resistance to herbicides that act to inhibit the action of acetolactate synthase (ALS), in particular the sulfonylurea-type herbicides (e.g., the acetolactate synthase (ALS) gene containing mutations leading to such resistance, in particular the S4 and/or Hra mutations), genes coding for resistance to herbicides that act to inhibit action of glutamine synthase, such as phosphinothricin or basta (e.g., the bar gene); glyphosate (e.g., the EPSPS gene and the GAT gene; see, for example, U.S. Publication No. 20040082770 and WO 03/092360); or other such genes known in the art. The bar gene encodes resistance to the herbicide basta, the nptll gene encodes resistance to the antibiotics kanamycin and geneticin, and the ALS-gene mutants encode resistance to the herbicide chlorsulfuron.

[0078] Sterility genes can also be encoded in an expression cassette and provide an alternative to physical detasseling. Examples of genes used in such ways include male tissue-preferred genes and genes with male sterility phenotypes such as QM, described in U.S. Pat. No. 5,583,210. Other genes include kinases and those encoding compounds toxic to either male or female gametophytic development.

[0079] The quality of grain is reflected in traits such as levels and types of oils, saturated and unsaturated, quality and quantity of essential amino acids, and levels of cellulose. In corn, modified hordothionin proteins are described in U.S. Pat. Nos. 5,703,049, 5,885,801, 5,885,802, and 5,990,389.

[0080] Commercial traits can also be encoded on a gene or genes that could increase for example, starch for ethanol production, or provide expression of proteins. Another important commercial use of transformed plants is the production of polymers and bioplastics such as described in U.S. Pat. No. 5,602,321. Genes such as β-Ketothiolase, PHBase (polyhydroxyburyrate synthase), and acetoacetyl-CoA reductase (see Schubert et al. (1988) J. Bacteriol. 170:5837-5847) facilitate expression of polyhyroxyalkanoates (PHAs).

[0081] Exogenous products include plant enzymes and products as well as those from other sources including prokaryotes and other eukaryotes. Such products include enzymes, cofactors, hormones, and the like. The level of proteins, particularly modified proteins having improved amino acid distribution to improve the nutrient value of the plant, can be increased. This is achieved by the expression of such proteins having enhanced amino acid content.

[0082] Additional polypeptide of interest include, for example, polypeptides such as various site specific recombinases and systems employing the same. See, for example, WO99/25821, WO99/25854, WO99/25840, WO99/25855, and WO99/25853, all of which are herein incorporated by reference. Other sequences of interest can include various meganucleases to target polynucleotides are set forth in WO 2009/114321 (herein incorporated by reference), which describes “custom” meganucleases. See, also, Gao et al. (2010) Plant Journal 1:176-187. Additional sequence of interest that can be employed, include but are not limited to ZnFingers, meganucleases, and, TAL nucleases. See, for example, WO2010079430, WO2011072246, and US20110201118, each of which is herein incorporated by reference in their entirety.

V. Sequences that Confers Tolerance to SU Ligand

[0083] As discussed elsewhere herein, a variety of SU ligands can be employed in the methods and compositions disclosed herein. It is recognized that host cell, the plant or plant part when exposed to the SU ligand should remain tolerant to the SU ligand employed. As used herein, “SU ligand-tolerant” or “tolerant” or “crop tolerance” or “herbicide-tolerant” or “sulfonylurea-tolerant” in the context of chemical-ligand treatment is intended that a host cell (i.e., a plant or plant cell) treated with the SU ligand will show no significant damage following the treatment in comparison to a host cell (i.e., a plant or plant part) not exposed the SU chemical ligand. A host cell (i.e., a plant) may be naturally tolerant to the SU ligand, or the host cell (i.e, the plant) may be tolerant to the SU ligand as a result of human intervention such as, for example, by the use of a recombinant construct, plant breeding or genetic engineering. Thus, the host cell (i.e., the plants) employed in the various methods disclosed herein can comprise a native or a heterologous sequence that confers tolerance to the sulfonylurea compound.

[0084] In one embodiment, the host cell, the plant or plant cell comprises a sulfonylurea-tolerant polypeptide. As used herein, a “sulfonylurea-tolerant polypeptide” comprises any polypeptide which when expressed in a host cell or a plant or a plant cell confers tolerance to at least one sulfonylurea. Sulfonylurea herbicides inhibit growth of higher plants by blocking acetolactate synthase (ALS), also known as, acetohydroxy acid synthase (AHAS). Plants containing particular mutations in ALS (e.g., the S4 and/or HRA mutations) are tolerant to sulfonylurea herbicides. The production of sulfonylurea-tolerant plants is described more fully in U.S. Pat. Nos. 5,605,011; 5,013,659; 5,141,870; 5,767,361; 5,731,180; 5,304,732; 4,761,373; 5,331,107; 5,928,937; and 5,378,824; and international publication WO 96/33270, which are incorporated herein by reference in their entireties for all purposes. The sulfonylurea-tolerant polypeptide can be encoded by, for example, the SuRA or SuRB locus of ALS. In specific embodiments, the ALS inhibitor-tolerant polypeptide comprises the C3 ALS mutant, the HRA ALS mutant, the S4 mutant or the S4/HRA mutant or any combination thereof. Different mutations in ALS are known to confer tolerance to different herbicides and groups (and/or subgroups) of herbicides; see, e.g., Tranel and Wright (2002) Weed Science 50:700-712. See also, U.S. Pat. Nos. 5,605,011, 5,378,824, 5,141,870, and 5,013,659, each of which is herein incorporated by reference in their entirety. The HRA mutation in ALS finds particular use in one embodiment. The mutation results in the production of an acetolactate synthase polypeptide which is resistant to at least one sulfonylurea compound in comparison to the wild-type protein. As the HRA mutation provides resistance to both SUs and imidazolinones, the use of the HRA mutation allows for the use of a selectable marker that does not trigger the induction response.

[0085] A SU ligand does not “significantly damage” a host cell, a plant or plant cell when it either has no effect on the host cell or plant or when it has some effect on the host cell or the plant from which the host cell or the plant later recovers, or when it has an effect which is detrimental but which is offset, for example, by the impact of the particular SU herbicide on weeds or the desired phenotype produced by the chemical-gene switch system. Thus, for example, a plant is not “significantly damaged by” a SU ligand treatment if it exhibits less than 50%, 40%, 30%, 25%, 20%, 15%, 10%, 9%, 8%, 7%, 6%, 5%, 4%, 3%, 2%, or 1% decrease in at least one suitable parameter that is indicative of plant health and/or productivity in comparison to an appropriate control plant (e.g., an untreated crop plant). Suitable parameters that are indicative of plant health and/or productivity include, for example, plant height, plant weight, leaf length, time elapsed to a particular stage of development, flowering, yield, seed production, and the like. The evaluation of a parameter can be by visual inspection and/or by statistical analysis of any suitable parameter. Comparison may be made by visual inspection and/or by statistical analysis. Accordingly, a crop plant is not “significantly damaged by” a herbicide or other treatment if it exhibits a decrease in at least one parameter but that decrease is temporary in nature and the plant recovers fully within 1 week, 2 weeks, 3 weeks, 4 weeks, or 6 weeks.

### VI. Promoters

[0086] As outlined in detail above, a number of promoters can be used in the various recombinant constructs disclosed herein. The promoters can be selected based on the desired outcome. Promoters of interest can be a constitutive promoter or a non-constitutive promoter. Non-constitutive promoter can include, but are not limited to, a tissue preferred promoter, an inducible promoter, a ligand responsive promoter, a developmental stage preferred promoter, or a promoter having more than one of these properties. In some examples the promoter is primarily expressed in roots, leaves, stems, flowers, silks, anthers, pollen, meristem, germline, seed, endosperm, embryos, or progeny. Non-limiting examples of promoters employed within the constructs of the chemical-gene switch are discussed in detail below.

[0087] Constitutive promoters include, for example, the core promoter of the Rsyn7 promoter and other constitutive promoters disclosed in WO 99/43838 and U.S. Pat. No. 6,072,050; the core CaMV 35S promoter (Odell et al. (1985) Nature 313:810-812); rice actin (McElroy et al. (1990) Plant Cell 2:163-171); ubiquitin (Christensen et al. (1989) Plant Mol. Biol. 12:619-632 and Christensen et al. (1992) Plant Mol. Biol. 18:675-689); pEMU (Last et al. (1991) Theor. Appl. Genet. 81:581-588); MAS (Velten et al. (1984) EMBO J. 3:2723-2730); ALS promoter (U.S. Pat. No. 5,659,026), and the like. Other constitutive promoters include, for example, U.S. Pat. Nos. 5,608,149; 5,608,144; 5,604,121; 5,569,597; 5,466,785; 5,399,680; 5,268,463; 5,608,142; and 6,177,611.

[0088] Tissue-preferred promoters can be utilized to target enhanced expression within a particular plant tissue. Tissue-preferred promoters include Yamamoto et al. (1997) Plant J. 12(2):255-265; Kawamata et al. (1997) Plant Cell Physiol. 38(7):792-803; Hansen et al. (1997)Mol. Gen Genet. 254(3):337-343; Russell et al. (1997) Transgenic Res. 6(2):157-168; Rinehart et al. (1996) Plant Physiol. 112(3):1331-1341; Van Camp et al. (1996) Plant Physiol. 112(2):525-535; Canevascini et al. (1996) Plant Physiol. 112(2):513-524; Yamamoto et al. (1994) Plant Cell Physiol. 35(5):773-778; Lam (1994) Results Probl. Cell Differ. 20:181-196; Orozco et al. (1993) Plant Mol Biol. 23(6):1129-1138; Matsuoka et al. (1993) Proc Natl. Acad. Sci. USA 90(20):9586-9590; and Guevara-Garcia et al. (1993) Plant J. 4(3):495-505. Such promoters can be modified, if necessary, for weak expression.

[0089] Leaf-preferred promoters are known in the art. See, for example, Yamamoto et al. (1997) Plant J. 12(2):255-265; Kwon et al. (1994) Plant Physiol. 105:357-67; Yamamoto et al. (1994) Plant Cell Physiol. 35(5):773-778; Gotor et al. (1993) Plant J. 3:509-18; Orozco et al. (1993) Plant Mol. Biol. 23(6):1129-1138; and Matsuoka et al. (1993) Proc. Natl. Acad. Sci. USA 90(20):9586-9590.

[0090] Root-preferred promoters are known and can be selected from the many available from the literature or isolated de novo from various compatible species. See, for example, Hire et al. (1992) Plant Mol. Biol. 20(2):207-218 (soybean root-specific glutamine synthetase gene); Keller and Baumgartner (1991) Plant Cell 3(10):1051-1061 (root-specific control element in the GRP 1.8 gene of French bean); Sanger et al. (1990) Plant Mol. Biol. 14(3):433-443 (root-specific promoter of the mannopine synthase (MAS) gene of Agrobacterium tumefaciens); and Miao et al. (1991) Plant Cell 3(1):11-22 (full-length cDNA clone encoding cytosolic glutamine synthetase (GS), which is expressed in roots and root nodules of soybean). See also Bogusz et al. (1990) Plant Cell 2(7):633-641, where two root-specific promoters isolated from hemoglobin genes from the nitrogen-fixing nonlegume Parasponia andersonii and the related non-nitrogen-fixing nonlegume Trema tomentosa are described. The promoters of these genes were linked to a β-glucuronidase reporter gene and introduced into both the nonlegume Nicotiana tabacum and the legume Lotus corniculatus, and in both instances root-specific promoter activity was preserved. Leach and Aoyagi (1991) describe their analysis of the promoters of the highly expressed rolC and rolD root-inducing genes of Agrobacterium rhizogenes (see Plant Science (Limerick) 79(1):69-76). They concluded that enhancer and tissue-preferred DNA determinants are dissociated in those promoters. Teen et al. (1989) used gene fusion to lacZ to show that the Agrobacterium T-DNA gene encoding octopine synthase is especially active in the epidermis of the root tip and that the TR2′ gene is root specific in the intact plant and stimulated by wounding in leaf tissue, an especially desirable combination of characteristics for use with an insecticidal or larvicidal gene (see EMBO J. 8(2):343-350). The TR1′ gene, fused to nptll (neomycin phosphotransferase II) showed similar characteristics. Additional root-preferred promoters include the VfENOD-GRP3 gene promoter (Kuster et al. (1995) Plant Mol. Biol. 29(4):759-772); and rolB promoter (Capana et al. (1994) Plant Mol. Biol. 25(4):681-691. See also U.S. Pat. Nos. 5,837,876; 5,750,386; 5,633,363; 5,459,252; 5,401,836; 5,110,732; and 5,023,179.

[0091] “Seed-preferred” promoters include both “seed-specific” promoters (those promoters active during seed development such as promoters of seed storage proteins) as well as “seed-germinating” promoters (those promoters active during seed germination). See Thompson et al. (1989) BioEssays 10:108, herein incorporated by reference. Such seed-preferred promoters include, but are not limited to, Cim1 (cytokinin-induced message); cZ19B1 (maize 19 kDa zein); milps (myo-inositol-1-phosphate synthase) (see WO 00/11177 and U.S. Pat. No. 6,225,529; herein incorporated by reference). Gamma-zein is an endosperm-specific promoter. Globulin 1 (Glb-1) is a representative embryo-specific promoter. For dicots, seed-specific promoters include, but are not limited to, bean β-phaseolin, napin, β-conglycinin, soybean lectin, cruciferin, and the like. For monocots, seed-specific promoters include, but are not limited to, maize 15 kDa zein, 22 kDa zein, 27 kDa zein, gamma-zein, waxy, shrunken 1, shrunken 2, Globulin 1, etc. See also WO 00/12733, where seed-preferred promoters from end1 and end2 genes are disclosed; herein incorporated by reference.

[0092] Additional exemplary promoters include but are not limited to a 35S CaMV promoter (Odell et al. (1995) Nature 313:810-812), a S-adenosylmethionine synthase promoter (SAMS) (e.g., those disclosed in U.S. Pat. No. 7,217,858 and US2008/0026466), a Mirabilis mosaic virus promoter (e.g., Dey & Maiti (1999) Plant Mol Biol 40:771-782; Dey & Maiti (1999) Transgenics 3:61-70), an elongation factor promoter (e.g., US2008/0313776 and US2009/0133159), a banana streak virus promoter, an actin promoter (e.g., McElroy et al. (1990) Plant Cell 2:163-171), a TobRB7 promoter (e.g., Yamamoto et al. (1991) Plant Cell 3:371), a patatin promoter (e.g., patatin B33, Martin et al. (1997) Plant J 11:53-62), a ribulose 1,5-bisphosphate carboxylase promoter (e.g., rbcS-3A, see, for example Fluhr et al. (1986) Science 232:1106-1112, and Pellingrinischi et al. (1995) Biochem Soc Trans 23:247-250), an ubiquitin promoter (e.g., Christensen et al. (1992) Plant Mol Biol 18:675-689, and Christensen & Quail (1996) Transgen Res 5:213-218), a metallothionin promoter (e.g., US2010/0064390), a Rab17 promoter (e.g., Vilardell et al. (1994) Plant Mol Biol 24:561-569), a conglycinin promoter (e.g., Chamberland et al. (1992) Plant Mol Biol 19:937-949), a plasma membrane intrinsic (PIP) promoter (e.g., Alexandersson et al. (2009) Plant J 61:650-660), a lipid transfer protein (LTP) promoter (e.g., US2009/0158464, US2009/0070893, and US2008/0295201), a gamma zein promoter (e.g., Uead et al. (1994) Mol Cell Biol 14:4350-4359), a gamma kafarin promoter (e.g., Mishra et al. (2008) Mol Biol Rep 35:81-88), a globulin promoter (e.g., Liu et al. (1998) Plant Cell Rep 17:650-655), a legumin promoter (e.g., U.S. Pat. No. 7,211,712), an early endosperm promoter (EEP) (e.g., US2007/0169226 and US2009/0227013), a B22E promoter (e.g., Klemsdal et al. (1991) Mol Gen Genet 228:9-16), an oleosin promoter (e.g., Plant et al. (1994) Plant Mol Biol 25:193-205), an early abundant protein (EAP) promoter (e.g., U.S. Pat. No. 7,321,031), a late embryogenesis abundant (LEA) protein (e.g., Hval, Straub et al. (1994) Plant Mol Biol 26:617-630; Dhn and WSI18, Xiao & Xue (2001) Plant Cell Rep 20:667-673), In2-2 promoter (De Veylder et al. (1997) Plant Cell Physiol 38:568-577), a glutathione S-transferase (GST) promoter (e.g., WO93/01294), a PR promoter (e.g., Cao et al. (2006) Plant Cell Rep 6:554-560, and Ono et al. (2004) Biosci Biotech Biochem 68:803-807), an ACE1 promoter (e.g., Mett et al. (1993) Proc Natl Acad Sci USA 90:4567-4571), a steroid responsive promoter (e.g., Schena et al. (1991) Proc Natl Acad Sci USA 88:10421-10425, and McNellis et al. (1998) Plant J 14:247-257), an ethanol-inducible promoter (e.g., AlcA, Caddick et al. (1988) Nat Biotechnol 16:177-180), an estradiol-inducible promoter (e.g., Bruce et al. (2000) Plant Cell 12:65-79), an XVE estradiol-inducible promoter (e.g., Zao et al. (2000) Plant J 24: 265-273), a VGE methoxyfenozide-inducible promoter (e.g., Padidam et al. (2003) Transgen Res 12:101-109), or a TGV dexamethasone-inducible promoter (e.g., Bohner et al. (1999) Plant J 19:87-95).

[0093] i. Ligand Responsive Promoters

[0094] As used herein, a “ligand responsive promoter” comprises a minimal promoter sequence and at least one operator sequence which is capable of activating transcription of an operably linked polynucleotide. A minimal promoter sequence, as used herein, comprises at least the minimal number of regulatory elements which are needed to direct a basal level of transcription. Such promoters can further include any number of additional elements, such as, operator sequences, enhancers or other transcriptional regulatory elements which influence transcription levels in a desired manner. Such a ligand responsive promoter can be used in combination with the various SuR and revSuRs discussed herein to aid in the controlled expression of a sequence of interest. It is understood that depending on the minimal promoter sequence employed with the ligand responsive elements, a promoter can be designed to produce varying levels of transcriptional activity in the absence of the ligand-dependent transcriptional regulator.

[0095] For example, when employing a revSuR linked to a transcriptional activation domain (revSuR-TAD), in the presence of an effective concentration of SU ligand, the revSuR-TAD can bind one or more of the operators of the ligand responsive promoter and increase transcription of the operably linked sequence of interest. In the absence of an effective amount of the SU ligand, the revSuR-TA can no longer bind the operator and the operably linked polynucleotide is transcribed at the base level of the minimal promoter.

[0096] In other embodiments, in the absence of an effective concentration of SU ligand, an SuR that is linked to a transcriptional repression domain (SuR-TR; similar to that of TetR in U.S. Pat. No. 6,271,348, which is herein incorporated by reference in its entirety) can bind one or more operators of the ligand responsive promoter and further minimize basal transcription. In the presence of an effective concentration of the SU ligand, the SuR can no longer bind the operator and transcription of the operably linked polynucleotide is de-repressed.

[0097] Any combination of promoters and operators may be employed to form a ligand responsive promoter. Operators of interest include, but are not limited to, a TetR(A) operator sequence, a TetR(B) operator sequence, a TetR(D) operator sequence, TetR(E) operator sequence, a TetR(H) operator sequence, or an active variant or fragment thereof. Additional operators of interest include, but are not limited to, those that are regulated by the following repressors: tet, lac, trp, phd, arg, LexA, phiCh1 repressor, lambda C1 and Cro repressors, phage X repressor, MetJ, phir1t rro, phi434 C1 and Cro repressors, RafR, gal, ebg, uxuR, exuR, ROS, SinR, PurR, FruR, P22 C2, TetC, AcrR, Bet1, Bm3R1, EnvR, QacR, MtrR, TcmR, Ttk, YbiH, YhgD, and mu Ner, or DNA binding domains in Interpro families including but not limited to IPR001647, IPR010982, and IPR011991.

[0098] In one embodiment, the promoter is a minimal promoter with the sole intention of activating transcription beyond its minimal state.

[0099] In a second embodiment, the promoter is a repressible promoter whereby the promoter maintains all normal characteristics of the promoter i.e. constitutive, tissue specific, temporal specific etc., yet due to strategically embedded operator sequences can be conditionally repressed by SuR. In a further refinement of this technology the SuR can be translationally fused to a transcription repression domain (analogous to that of TetR in U.S. Pat. No. 6,271,348) and thus block access of the transcription complex both directly thru binding to operator sequences and indirectly thru heterochromatin formation following recruitment of the histone deacetylase complex.

[0100] In a third embodiment, the promoter can be a hybrid promoter whose transcription is both conditionally repressed and activated based on the presence/absence of sulfonylurea and SU responsive repressors and activators. In this example, operators are juxtaposed to the TATA box and/or transcriptional start site to enable active repression thru binding of SuR in the absence of SU while additional operators are located upstream of the TATA box or downstream of the transcriptional start site as a landing pad to enable transcriptional activation by revSuR-TA in the presence of SU. In this example, the operators targeted for repression would only be recognized by the SuR in the absence of ligand while the operators located upstream of the promoters would be bound by the revSuR-TAD activator in the presence of ligand. In a further refinement of this technology the SuR could be a hybrid protein with a transcriptional repression domain i.e. SuR-TR. See, for example Berens and Hillens (2003) Eur. J. Biochem. 207:1309-3121, herein incorporated by reference in its entirety.

[0101] In one embodiment, the ligand responsive promoter comprises at least one tet operator sequence. Binding of a sulfonylurea-responsive regulator to a tet operator is controlled by sulfonylurea compounds and analogs thereof. The tet operator sequence can be located within 0-30 nucleotides 5′ or 3′ of the TATA box of the ligand responsive promoter, including, for example, within 20, 19, 18, 17, 16, 15, 14, 13, 12, 11, 10, 9, 8, 7, 6, 5, 4, 3, 2, 1, or 0 nt of the TATA box. In other instances, the tet operator sequence may partially overlap with the TATA box sequence. In one non-limiting example, the tet operator sequence is SEQ ID NO:848 or an active variant or fragment thereof.

[0102] Useful tet operator containing promoters include, for example, those known in the art (see, e.g., Matzke et al. (2003) Plant Mol Biol Rep 21:9-19; Padidam (2003) Curr Op Plant Biol 6:169-177; Gatz & Quail (1988) PNAS 85:1394-1397; Ulmasov et al. (1997) Plant Mol Biol 35:417-424; Weinmann et al. (1994) Plant J 5:559-569). One or more tet operator sequences can be added to a promoter in order to produce a tetracycline inducible promoter. See, for example, Weinmann et al. (1994) Plant J 5:559-569; Love et al. (2000) Plant J 21:579-588. In addition, a widely tested tetracycline regulated expression system for plants using the CaMV 35S promoter was developed (Gatz et al. (1992) Plant J 2:397-404) having three tet operators introduced near the TATA box (3×OpT 35S).

[0103] Thus, a ligand responsive promoter comprising at least one, two, three or more operators (including a tet operator, such as that set forth in SEQ ID NO:848 or an active variant or fragment thereof) regulating expression of said repressor can be used. Non-limiting ligand responsive promoters for expression of the chemically-regulated transcriptional repressor, include the ligand responsive promoters set forth in SEQ ID NO:885, 856, 857, 858, 859, or 860 or active variants and fragments thereof.

[0104] Any promoter can be combined with an operator to generate a ligand responsive promoter. In specific embodiments, the promoter is active in plant cells. The promoter can be a constitutive promoter or a non-constitutive promoter. Non-constitutive promoters include tissue-preferred promoter, such as a promoter that is primarily expressed in roots, leaves, stems, flowers, silks, anthers, pollen, meristem, seed, endosperm, or embryos.

[0105] In particular embodiments, the promoter is a plant actin promoter, a banana streak virus promoter (BSV), an MMV promoter, an enhanced MMV promoter (dMMV), a plant P450 promoter, or an elongation factor 1a (EF1A) promoter. Promoters of interest include, for example, a plant actin promoter (SEQ ID NO:849), a banana streak virus promoter (BSV) (SEQ ID NO:850), a mirabilis mosaic virus promoter (MMV) (SEQ ID NO:851), an enhanced MMV promoter (dMMV) (SEQ ID NO:852), a plant P450 promoter (MP1) (SEQ ID NO:853), or an elongation factor 1a (EF1A) promoter (SEQ ID NO:854), or an active variant for fragment thereof.

[0106] The ligand responsive promoter can comprise one or more operator sequences. For example, the ligand responsive promoter can comprise 1, 2, 3, 4, 5, 6, 7, 8, 9, 10, 11, 12, 13, 14, 15 or more operator sequences. In one embodiment, the ligand responsive promoter comprises two tet operator sequences, wherein the 1^{st} tet operator sequence is located within 0-30 nt 5′ of the TATA box and the 2^{nd} tet operator sequence is located within 0-30 nt 3′ of the TATA box. In some examples, the first and/or the second tet operator sequence is located within 20, 19, 18, 17, 16, 15, 14, 13, 12, 11, 10, 9, 8, 7, 6, 5, 4, 3, 2, 1, or 0 nt of the TATA box. In some examples the first and/or the second tet operator sequence may partially overlap with the TATA box sequence. In some examples, the first and/or the second tet operator sequence is SEQ ID NO:848 or an active variant or fragment thereof.

[0107] In other embodiments, the ligand responsive promoter comprises three tet operator sequences, wherein the 1^{st} tet operator sequence is located within 0-30 nt 5′ of the TATA box, and the 2^{nd} tet operator sequence is located within 0-30 nt 3′ of the TATA box, and the 3^{rd} tet operator is located with 0-50 nt of the transcriptional start site (TSS). In some examples, the 1^{st} and/or the 2^{nd} tet operator sequence is located within 20, 19, 18, 17, 16, 15, 14, 13, 12, 11, 10, 9, 8, 7, 6, 5, 4, 3, 2, 1, or 0 nt of the TATA box. In other instances, the 3^{rd} tet operator sequence is located within 50, 45, 40, 35, 30, 25, 20, 19, 18, 17, 16, 15, 14, 13, 12, 11, 10, 9, 8, 7, 6, 5, 4, 3, 2, 1, or 0 nt of the TSS. In some examples, the 3^{rd} tet operator is located 5′ of the TSS, or the 3^{rd} tet operator sequence may partially overlap with the TSS sequence. In one non-limiting embodiment, the 1^{st}, 2^{nd} and/or the 3^{rd} tet operator sequence is SEQ ID NO:848 or active variant or fragment thereof.

[0108] In specific examples, the ligand responsive promoter is a plant actin promoter (actin/Op) (SEQ ID NO:855), a banana streak virus promoter (BSV/Op) (SEQ ID NO:856), a mirabilis mosaic virus promoter (MMV/Op) (SEQ ID NO:857), an enhanced MMV promoter (dMMV/Op) (SEQ ID NO:858), a plant P450 promoter (MP1/Op) (SEQ ID NO:859), or an elongation factor 1a (EF1A/Op) promoter (SEQ ID NO:860) or an active variant or fragment thereof. Thus, the ligand responsive promoter can comprise a polynucleotide sequence having at least about 50%, 60%, 65%, 66%, 67%, 68%, 69%, 70%, 71%, 72%, 73%, 74%, 75%, 76%, 77%, 78%, 79%, 80%, 81%, 82%, 83%, 84%, 85%, 86%, 87%, 88%, 89%, 90%, 91%, 92%, 93%, 94%, 95%, 96%, 97%, 98% or 99% sequence identity to SEQ ID NO:885, 856, 857, 858, 859, or 860, wherein the promoter retains ligand responsive promoter activity. In a specific example, the promoter comprises a polynucleotide sequence having at least 95% sequence identity to SEQ ID NO:885, 856, 857, 858, 859, or 860, wherein the promoter retains ligand responsive promoter activity.

[0109] In some embodiments, the ligand responsive promoter employed in the chemical-gene switch or to express the fusion protein comprising the SU-dependent stabilization domain is expressed in various tissues or cells, restricted to selected tissue or cell type, restricted to specific developmental stage(s), restricted to specific environmental conditions, and/or restricted to specific generation of a plant or progeny thereof. In some examples, the polynucleotide of interest operably linked to a ligand responsive promoter that, when un-repressed, expresses primarily expressed in roots, leaves, stems, flowers, silks, anthers, pollen, meristem, germline, seed, endosperm, embryos, or progeny. In some examples, expression of the polynucleotide of interest or the fusion protein comprising the SU-dependent stabilization domain operably linked to the ligand responsive promoter results in expression occurring primarily at specific times, which include but are not limited to seed or plant developmental stages, vegetative growth, reproductive cycle, response to environmental conditions, response to pest or pathogen presence, response to chemical compounds, or any combination thereof. In other embodiments, expression of the polynucleotide of interest or the fusion protein comprising the SU-dependent stabilization domain is reduced, inhibited, or blocked in various tissues or cells, which may be restricted to selected tissue or cell type, restricted to specific developmental stage(s), restricted to specific environmental conditions, and/or restricted to specific generation of a plant or progeny thereof. In some examples expression of the polynucleotide of interest or the fusion protein comprising the SU-dependent stabilization domain is primarily inhibited in roots, leaves, stems, flowers, silks, anthers, pollen, meristem, germline, seed, endosperm, embryos, or progeny. In some examples expression of the polynucleotide of interest occurs primarily inhibited at specific times, which include but are not limited to seed or plant developmental stages, vegetative growth, reproductive cycle, response to environmental conditions, response to pest or pathogen presence, response to chemical compounds, or any combination thereof.

### VII. Polynucleotide Constructs

[0110] The use of the term “polynucleotide” is not intended to limit the methods and compositions to polynucleotides comprising DNA. Those of ordinary skill in the art will recognize that polynucleotides can comprise ribonucleotides and combinations of ribonucleotides and deoxyribonucleotides. Such deoxyribonucleotides and ribonucleotides include both naturally occurring molecules and synthetic analogues. The polynucleotides of the invention also encompass all forms of sequences including, but not limited to, single-stranded forms, double-stranded forms, hairpins, stem-and-loop structures, and the like.

[0111] The various polynucleotide sequences employed herein can be provided in expression cassettes for expression in the host cell or plant of interest. The cassette can include 5′ and 3′ regulatory sequences operably linked to the chemically-regulated transcriptional repressor, the silencing element and the polynucleotide of interest. “Operably linked” is intended to mean a functional linkage between two or more elements. For example, an operable linkage between a polynucleotide of interest and a regulatory sequence (i.e., a promoter) is a functional link that allows for expression of the polynucleotide of interest. Operably linked elements may be contiguous or non-contiguous. When used to refer to the joining of two protein coding regions, by operably linked is intended that the coding regions are in the same reading frame. The cassette may additionally contain at least one additional gene to be cotransformed into the organism. Alternatively, the additional gene(s) can be provided on multiple expression cassettes. Such an expression cassette is provided with a plurality of restriction sites and/or recombination sites for insertion of the polynucleotide to be under the transcriptional regulation of the regulatory regions. The expression cassette may additionally contain selectable marker genes.

[0112] The expression cassette can include in the 5′-3′ direction of transcription, a transcriptional and translational initiation region (i.e., a promoter), a polynucleotide disclosed herein, and a transcriptional and translational termination region (i.e., termination region) functional in the host cell or plant. The regulatory regions (i.e., promoters, transcriptional regulatory regions, and translational termination regions) and/or the various polynucleotides operably linked to the promoter may be native/analogous to the host cell or to each other. Alternatively, the regulatory regions may be heterologous to the host cell or to each other.

[0113] As used herein, “heterologous” in reference to a sequence is a sequence that originates from a foreign species, or, if from the same species, is substantially modified from its native form in composition and/or genomic locus by deliberate human intervention. For example, a promoter operably linked to a heterologous polynucleotide is from a species different from the species from which the polynucleotide was derived, or, if from the same/analogous species, one or both are substantially modified from their original form and/or genomic locus, or the promoter is not the native promoter for the operably linked polynucleotide.

[0114] The termination region may be native with the transcriptional initiation region, may be native with the plant host, or may be derived from another source (i.e., foreign or heterologous) to the promoter, the plant host, or any combination thereof. Convenient termination regions are available from the Ti-plasmid of A. tumefaciens, such as the octopine synthase and nopaline synthase termination regions. See also Guerineau et al. (1991) Mol. Gen. Genet. 262:141-144; Proudfoot (1991) Cell 64:671-674; Sanfacon et al. (1991) Genes Dev. 5:141-149; Mogen et al. (1990) Plant Cell 2:1261-1272; Munroe et al. (1990) Gene 91:151-158; Ballas et al. (1989) Nucleic Acids Res. 17:7891-7903; and Joshi et al. (1987) Nucleic Acids Res. 15:9627-9639.

[0115] Where appropriate, the various polynucleotides disclosed herein may be optimized for increased expression in the transformed plant. That is, the polynucleotides can be synthesized using plant-preferred codons for improved expression. See, for example, Campbell and Gowri (1990) Plant Physiol. 92:1-11 for a discussion of host-preferred codon usage. Methods are available in the art for synthesizing plant-preferred genes. See, for example, U.S. Pat. Nos. 5,380,831, and 5,436,391, and Murray et al. (1989) Nucleic Acids Res. 17:477-498, herein incorporated by reference.

[0116] Additional sequence modifications are known to enhance gene expression in a cellular host. These include elimination of sequences encoding spurious polyadenylation signals, exon-intron splice site signals, transposon-like repeats, and other such well-characterized sequences that may be deleterious to gene expression. The G-C content of the sequence may be adjusted to levels average for a given cellular host, as calculated by reference to known genes expressed in the host cell. When possible, the sequence is modified to avoid predicted hairpin secondary mRNA structures.

[0117] The expression cassettes may additionally contain 5′ leader sequences. Such leader sequences can act to enhance translation. Translation leaders are known in the art and include: picornavirus leaders, for example, EMCV leader (Encephalomyocarditis 5′ noncoding region) (Elroy-Stein et al. (1989) Proc. Natl. Acad. Sci. USA 86:6126-6130); potyvirus leaders, for example, TEV leader (Tobacco Etch Virus) (Gallie et al. (1995) Gene 165(2):233-238), MDMV leader (Maize Dwarf Mosaic Virus) (Virology 154:9-20), and human immunoglobulin heavy-chain binding protein (BiP) (Macejak et al. (1991) Nature 353:90-94); untranslated leader from the coat protein mRNA of alfalfa mosaic virus (AMV RNA 4) (Jobling et al. (1987) Nature 325:622-625); tobacco mosaic virus leader (TMV) (Gallie et al. (1989) in Molecular Biology of RNA, ed. Cech (Liss, New York), pp. 237-256); and maize chlorotic mottle virus leader (MCMV) (Lommel et al. (1991) Virology 81:382-385. See also, Della-Cioppa et al. (1987) Plant Physiol. 84:965-968.

[0118] In preparing the expression cassette, the various DNA fragments may be manipulated, so as to provide for the DNA sequences in the proper orientation and, as appropriate, in the proper reading frame. Toward this end, adapters or linkers may be employed to join the DNA fragments or other manipulations may be involved to provide for convenient restriction sites, removal of superfluous DNA, removal of restriction sites, or the like. For this purpose, in vitro mutagenesis, primer repair, restriction, annealing, resubstitutions, e.g., transitions and transversions, may be involved.

[0119] As discussed in detail elsewhere herein, a number of promoters can be used to express the various components. The promoters can be selected based on the desired outcome.

[0120] The expression cassette(s) can also comprise a selectable marker gene for the selection of transformed cells. Selectable marker genes are utilized for the selection of transformed cells or tissues. Marker genes include genes encoding antibiotic resistance, such as those encoding neomycin phosphotransferase II (NEO) and hygromycin phosphotransferase (HPT), as well as genes conferring resistance to herbicidal compounds, such as glyphosate, glufosinate ammonium, bromoxynil, sulfonylureas, dicamba, and 2,4-dichlorophenoxyacetate (2,4-D). Additional selectable markers include phenotypic markers such as β-galactosidase and fluorescent proteins such as green fluorescent protein (GFP) (Su et al. (2004) Biotechnol Bioeng 85:610-9 and Fetter et al. (2004) Plant Cell 16:215-28), cyan florescent protein (CYP) (Bolte et al. (2004) J Cell Science 117:943-54 and Kato et al. (2002) Plant Physiol 129:913-42), and yellow florescent protein (PhiYFP™ from Evrogen, see, Bolte et al. (2004) J. Cell Science 117:943-54). For additional selectable markers, see generally, Yarranton (1992) Curr. Opin. Biotech. 3:506-511; Christopherson et al. (1992) Proc. Natl. Acad. Sci. USA 89:6314-6318; Yao et al. (1992) Cell 71:63-72; Reznikoff (1992)Mol. Microbiol. 6:2419-2422; Barkley et al. (1980) in The Operon, pp. 177-220; Hu et al. (1987) Cell 48:555-566; Brown et al. (1987) Cell 49:603-612; Figge et al. (1988) Cell 52:713-722; Deuschle et al. (1989) Proc. Natl. Acad. Aci. USA 86:5400-5404; Fuerst et al. (1989) Proc. Natl. Acad. Sci. USA 86:2549-2553; Deuschle et al. (1990) Science 248:480-483; Gossen (1993) Ph.D. Thesis, University of Heidelberg; Reines et al. (1993) Proc. Natl. Acad. Sci. USA 90:1917-1921; Labow et al. (1990) Mol. Cell. Biol. 10:3343-3356; Zambretti et al. (1992) Proc. Natl. Acad. Sci. USA 89:3952-3956; Baim et al. (1991) Proc. Natl. Acad. Sci. USA 88:5072-5076; Wyborski et al. (1991) Nucleic Acids Res. 19:4647-4653; Hillenand-Wissman (1989) Topics Mol. Struc. Biol. 10:143-162; Degenkolb et al. (1991) Antimicrob. Agents Chemother. 35:1591-1595; Kleinschnidt et al. (1988) Biochemistry 27:1094-1104; Bonin (1993) Ph.D. Thesis, University of Heidelberg; Gossen et al. (1992) Proc. Natl. Acad. Sci. USA 89:5547-5551; Oliva et al. (1992) Antimicrob. Agents Chemother. 36:913-919; Hlavka et al. (1985) Handbook of Experimental Pharmacology, Vol. 78 (Springer-Verlag, Berlin); Gill et al. (1988) Nature 334:721-724. Such disclosures are herein incorporated by reference. The above list of selectable marker genes is not meant to be limiting.

[0121] The various components can be introduced into a host cell or plant on a single polynucleotide construct or single plasmid or on separate polynucleotide constructs or on separate plasmids. It is further recognized the various components disclosed herein can be brought together through any means including the introduction of one or more component into a plant and then breeding the individual components together into a single plant.

### IIX. Host Cells

[0122] The various DNA constructs disclosed herein can be introduced/expressed in a host cell such as bacteria, yeast, insect, mammalian, or plant cells. It is expected that those of skill in the art are knowledgeable in the numerous systems available for the introduction of a polypeptide or a nucleotide sequence of the present invention into a host cell. No attempt to describe in detail the various methods known for providing proteins in prokaryotes or eukaryotes will be made.

[0123] By “host cell” is meant a cell, which comprises a heterologous nucleic acid sequence of the invention. Host cells may be prokaryotic cells such as E. coli, or eukaryotic cells such as yeast, insect, amphibian, or mammalian cells. Host cells can also be monocotyledonous or dicotyledonous plant cells. In one embodiment, the monocotyledonous host cell is a maize host cell.

[0124] Plants, plant cells, plant parts and seeds, and grain having one or more of the recombinant constructs disclosed herein are provided. In specific embodiments, the plants and/or plant parts have stably incorporated at least one of the recombinant constructs.

[0125] As used herein, the term plant includes plant cells, plant protoplasts, plant cell tissue cultures from which plants can be regenerated, plant calli, plant clumps, and plant cells that are intact in plants or parts of plants such as embryos, pollen, ovules, seeds, leaves, flowers, branches, fruit, kernels, ears, cobs, husks, stalks, roots, root tips, anthers, and the like. Grain is intended to mean the mature seed produced by commercial growers for purposes other than growing or reproducing the species. Progeny, variants, and mutants of the regenerated plants are also included within the scope of the invention, provided that these parts comprise the introduced polynucleotides.

[0126] Various plant species that can comprise a host cell include, but are not limited to, corn (Zea mays), Brassica sp. (e.g., B. napus, B. rapa, B. juncea), particularly those Brassica species useful as sources of seed oil, alfalfa (Medicago sativa), rice (Oryza sativa), rye (Secale cereale), sorghum (Sorghum bicolor, Sorghum vulgare), millet (e.g., pearl millet (Pennisetum glaucum), proso millet (Panicum miliaceum), foxtail millet (Setaria italica), finger millet (Eleusine coracana)), sunflower (Helianthus annuus), safflower (Carthamus tinctorius), wheat (Triticum aestivum), soybean (Glycine max), tobacco (Nicotiana tabacum), potato (Solanum tuberosum), peanuts (Arachis hypogaea), cotton (Gossypium barbadense, Gossypium hirsutum), sweet potato (Ipomoea batatus), cassava (Manihot esculenta), coffee (Coffea spp.), coconut (Cocos nucifera), pineapple (Ananas comosus), citrus trees (Citrus spp.), cocoa (Theobroma cacao), tea (Camellia sinensis), banana (Musa spp.), avocado (Persea americana), fig (Ficus casica), guava (Psidium guajava), mango (Mangifera indica), olive (Olea europaea), papaya (Carica papaya), cashew (Anacardium occidentale), macadamia (Macadamia integrifolia), almond (Prunus amygdalus), sugar beets (Beta vulgaris), sugarcane (Saccharum spp.), oats, barley, vegetables, ornamentals, grasses and conifers.

[0127] Vegetables include tomatoes (Lycopersicon esculentum), lettuce (e.g., Lactuca sativa), green beans (Phaseolus vulgaris), lima beans (Phaseolus limensis), peas (Lathyrus spp.), and members of the genus Cucumis such as cucumber (C. sativus), cantaloupe (C. cantalupensis), and musk melon (C. melo). Ornamentals include azalea (Rhododendron spp.), hydrangea (Macrophylla hydrangea), hibiscus (Hibiscus rosasanensis), roses (Rosa spp.), tulips (Tuhpa spp.), daffodils (Narcissus spp.), petunias (Petunia hybrida), carnation (Dianthus caryophyllus), poinsettia (Euphorbia pulcherrima), and chrysanthemum.

[0128] Conifers that may be employed in practicing the present invention include, for example, pines such as loblolly pine (Pinus taeda), slash pine (Pinus elliotii), ponderosa pine (Pinus ponderosa), lodgepole pine (Pinus contorta), and Monterey pine (Pinus radiata); Douglas-fir (Pseudotsuga menziesii); Western hemlock (Tsuga canadensis); Sitka spruce (Picea glauca); redwood (Sequoia sempervirens); true firs such as silver fir (Abies amabilis) and balsam fir (Abies balsamea); and cedars such as Western red cedar (Thuja plicata) and Alaska yellow-cedar (Chamaecyparis nootkatensis). In specific embodiments, plants of the present invention are crop plants (for example, corn, alfalfa, sunflower, Brassica, soybean, cotton, safflower, peanut, sorghum, wheat, millet, tobacco, etc.). In other embodiments, corn and soybean plants are optimal, and in yet other embodiments corn plants are optimal.

[0129] Other plants of interest include grain plants that provide seeds of interest, oil-seed plants, and leguminous plants. Seeds of interest include grain seeds, such as corn, wheat, barley, rice, sorghum, rye, etc. Oil-seed plants include cotton, soybean, safflower, sunflower, Brassica, maize, alfalfa, palm, coconut, etc. Leguminous plants include beans and peas. Beans include guar, locust bean, fenugreek, soybean, garden beans, cowpea, mungbean, lima bean, fava bean, lentils, chickpea, etc.

[0130] A “subject plant or plant cell” is one in which genetic alteration, such as transformation, has been affected as to a gene of interest, or is a plant or plant cell which is descended from a plant or cell so altered and which comprises the alteration. A “control” or “control plant” or “control plant cell” provides a reference point for measuring changes in phenotype of the subject plant or plant cell.

[0131] A control plant or plant cell may comprise, for example: (a) a wild-type plant or cell, i.e., of the same genotype as the starting material for the genetic alteration which resulted in the subject plant or cell; (b) a plant or plant cell of the same genotype as the starting material but which has been transformed with a null construct (i.e. with a construct which has no known effect on the trait of interest, such as a construct comprising a marker gene); (c) a plant or plant cell which is a non-transformed segregant among progeny of a subject plant or plant cell; (d) a plant or plant cell genetically identical to the subject plant or plant cell but which is not exposed to conditions or stimuli that would induce expression of the gene of interest and/or the silencing element; (e) the subject plant or plant cell itself, under conditions in which the gene of interest is not expressed.

[0132] As outlined above, plants and plant parts having any one of the recombinant constructs disclosed herein can further display tolerance to the SU chemical ligand. The tolerance to the SU ligand can be naturally occurring or can be generated by human intervention via breeding or the introduction of recombination sequences that confer tolerance to the SU ligand. Thus, in some instances the plants comprising the chemical-gene switch comprise sequence that confer tolerant to a SU herbicide, including for example altered forms of AHAS, including the HRA sequence.

### IX. Introducing Polynucleotides

[0133] The methods provided herein comprise introducing a polypeptide or polynucleotide into a host cell (i.e., a plant). “Introducing” is intended to mean presenting to the host cell (i.e., a plant cell) the polynucleotide or polypeptide in such a manner that the sequence gains access to the interior of a cell. The methods of the invention do not depend on a particular method for introducing a sequence into the host cell, only that the polynucleotide or polypeptides gains access to the interior of at least one cell of the host. Methods for introducing polynucleotide or polypeptides into host cells (i.e., plants) are known in the art and include, but are not limited to, stable transformation methods, transient transformation methods, and virus-mediated methods.

[0134] “Stable transformation” is intended to mean that the nucleotide construct introduced into a host (i.e., a plant) integrates into the genome of the plant and is capable of being inherited by the progeny thereof “Transient transformation” is intended to mean that a polynucleotide is introduced into the host (i.e., a plant) and expressed temporally or a polypeptide is introduced into a host (i.e., a plant).

[0135] Transformation protocols as well as protocols for introducing polypeptides or polynucleotide sequences into plants may vary depending on the type of plant or plant cell, i.e., monocot or dicot, targeted for transformation. Suitable methods of introducing polypeptides and polynucleotides into plant cells include microinjection (Crossway et al. (1986) Biotechniques 4:320-334), electroporation (Riggs et al. (1986) Proc. Natl. Acad. Sci. USA 83:5602-5606, Agrobacterium-mediated transformation (Townsend et al., U.S. Pat. No. 5,563,055; Zhao et al., U.S. Pat. No. 5,981,840), direct gene transfer (Paszkowski et al. (1984) EMBO J. 3:2717-2722), and ballistic particle acceleration (see, for example, Sanford et al., U.S. Pat. No. 4,945,050; Tomes et al., U.S. Pat. No. 5,879,918; Tomes et al., U.S. Pat. No. 5,886,244; Bidney et al., U.S. Pat. No. 5,932,782; Tomes et al. (1995) “Direct DNA Transfer into Intact Plant Cells via Microprojectile Bombardment,” in Plant Cell, Tissue, and Organ Culture: Fundamental Methods, ed. Gamborg and Phillips (Springer-Verlag, Berlin); McCabe et al. (1988) Biotechnology 6:923-926); and Lec1 transformation (WO 00/28058). Also see Weissinger et al. (1988) Ann. Rev. Genet. 22:421-477; Sanford et al. (1987) Particulate Science and Technology 5:27-37 (onion); Christou et al. (1988) Plant Physiol. 87:671-674 (soybean); McCabe et al. (1988) Bio/Technology 6:923-926 (soybean); Finer and McMullen (1991) In Vitro Cell Dev. Biol. 27P:175-182 (soybean); Singh et al. (1998) Theor. Appl. Genet. 96:319-324 (soybean); Datta et al. (1990) Biotechnology 8:736-740 (rice); Klein et al. (1988) Proc. Natl. Acad. Sci. USA 85:4305-4309 (maize); Klein et al. (1988) Biotechnology 6:559-563 (maize); Tomes, U.S. Pat. No. 5,240,855; Buising et al., U.S. Pat. Nos. 5,322,783 and 5,324,646; Tomes et al. (1995) “Direct DNA Transfer into Intact Plant Cells via Microprojectile Bombardment,” in Plant Cell, Tissue, and Organ Culture: Fundamental Methods, ed. Gamborg (Springer-Verlag, Berlin) (maize); Klein et al. (1988) Plant Physiol. 91:440-444 (maize); Fromm et al. (1990) Biotechnology 8:833-839 (maize); Hooykaas-Van Slogteren et al. (1984) Nature (London) 311:763-764; Bowen et al., U.S. Pat. No. 5,736,369 (cereals); Bytebier et al. (1987) Proc. Natl. Acad. Sci. USA 84:5345-5349 (Liliaceae); De Wet et al. (1985) in The Experimental Manipulation of Ovule Tissues, ed. Chapman et al. (Longman, New York), pp. 197-209 (pollen); Kaeppler et al. (1990) Plant Cell Reports 9:415-418 and Kaeppler et al. (1992) Theor. Appl. Genet. 84:560-566 (whisker-mediated transformation); D'Halluin et al. (1992) Plant Cell 4:1495-1505 (electroporation); Li et al. (1993) Plant Cell Reports 12:250-255 and Christou and Ford (1995) Annals of Botany 75:407-413 (rice); Osjoda et al. (1996) Nature Biotechnology 14:745-750 (maize via Agrobacterium tumefaciens); all of which are herein incorporated by reference.

[0136] In specific embodiments, the various constructs disclosed herein can be provided to a host cell (i.e., a plant cell) using a variety of transient transformation methods. Such methods include, for example, microinjection or particle bombardment. See, for example, Crossway et al. (1986) Mol Gen. Genet. 202:179-185; Nomura et al. (1986) Plant Sci. 44:53-58; Hepler et al. (1994) Proc. Natl. Acad. Sci. 91: 2176-2180 and Hush et al. (1994) The Journal of Cell Science 107:775-784, all of which are herein incorporated by reference. Alternatively, the various polynucleotides can be transiently transformed into the host cell (i.e., a plant cell) using techniques known in the art. Such techniques include viral vector system and the precipitation of the polynucleotide in a manner that precludes subsequent release of the DNA. Thus, the transcription from the particle-bound DNA can occur, but the frequency with which it is released to become integrated into the genome is greatly reduced. Such methods include the use particles coated with polyethylimine (PEI; Sigma #P3143).

[0137] In other embodiments, the polynucleotides disclosed herein may be introduced into the host cells (i.e., a plant cell) by contacting the host cell with a virus or viral nucleic acids. Generally, such methods involve incorporating a nucleotide construct of the invention within a viral DNA or RNA molecule. Further, it is recognized that promoters employed can also encompass promoters utilized for transcription by viral RNA polymerases. Methods for introducing polynucleotides into plants and expressing a protein encoded therein, involving viral DNA or RNA molecules, are known in the art. See, for example, U.S. Pat. Nos. 5,889,191, 5,889,190, 5,866,785, 5,589,367, 5,316,931, and Porta et al. (1996) Molecular Biotechnology 5:209-221; herein incorporated by reference.

[0138] Methods are known in the art for the targeted insertion of a polynucleotide at a specific location in the plant genome. In one embodiment, the insertion of the polynucleotide at a desired genomic location is achieved using a site-specific recombination system. See, for example, WO99/25821, WO99/25854, WO99/25840, WO99/25855, and WO99/25853, all of which are herein incorporated by reference.

[0139] The cells that have been transformed may be grown into plants in accordance with conventional ways. See, for example, McCormick et al. (1986) Plant Cell Reports 5:81-84. These plants may then be grown, and either pollinated with the same transformed strain or different strains, and the resulting progeny having constitutive expression of the desired phenotypic characteristic identified. Two or more generations may be grown to ensure that expression of the desired phenotypic characteristic is stably maintained and inherited and then seeds harvested to ensure expression of the desired phenotypic characteristic has been achieved. In this manner, the present invention provides transformed seed (also referred to as “transgenic seed”) having at least one recombinant polynucleotide disclosed herein, stably incorporated into their genome.

[0140] In some examples, the various recombinant polynucleotides can be introduced into a plastid, either by transformation of the plastid or by directing a transcript or polypeptide into the plastid. Any method of transformation, nuclear or plastid, can be used, depending on the desired product and/or use. Plastid transformation provides advantages including high transgene expression, control of transgene expression, ability to express polycistronic messages, site-specific integration via homologous recombination, absence of transgene silencing and position effects, control of transgene transmission via uniparental plastid gene inheritance and sequestration of expressed polypeptides in the organelle which can obviate possible adverse impacts on cytoplasmic components (e.g., see, reviews including Heifetz (2000) Biochimie 82:655-666; Daniell et al. (2002) Trends Plant Sci 7:84-91; Maliga (2002) Curr Op Plant Biol 5:164-172; Maliga (2004) Ann Rev Plant Biol 55-289-313; Daniell et al. (2005) Trends Biotechnol 23:238-245 and Verma and Daniell (2007) Plant Physiol 145:1129-1143).

[0141] Methods and compositions of plastid transformation are well known, for example, transformation methods include (Boynton et al. (1988) Science 240:1534-1538; Svab et al. (1990) Proc Natl Acad Sci USA 87:8526-8530; Svab et al. (1990) Plant Mol Biol 14:197-205; Svab et al. (1993) Proc Natl Acad Sci USA 90:913-917; Golds et al. (1993) Bio/Technology 11:95-97; O'Neill et al. (1993) Plant J 3:729-738; Koop et al. (1996) Planta 199:193-201; Kofer et al. (1998) In Vitro Plant 34:303-309; Knoblauch et al. (1999) Nat Biotechnol 17:906-909); as well as plastid transformation vectors, elements, and selection (Newman et al. (1990) Genetics 126:875-888; Goldschmidt-Clermont, (1991) Nucl Acids Res 19:4083-4089; Carrer et al. (1993) Mol Gen Genet 241:49-56; Svab et al. (1993) Proc Natl Acad Sci USA 90:913-917; Verma and Daniell (2007) Plant Physiol 145:1129-1143).

[0142] Methods and compositions for controlling gene expression in plastids are well known including (McBride et al. (1994) Proc Natl Acad Sci USA 91:7301-7305; Lössel et al. (2005) Plant Cell Physiol 46:1462-1471; Heifetz (2000) Biochemie 82:655-666; Surzycki et al. (2007) Proc Natl Acad Sci USA 104:17548-17553; U.S. Pat. Nos. 5,576,198 and 5,925,806; WO 2005/0544478), as well as methods and compositions to import polynucleotides and/or polypeptides into a plastid, including translational fusion to a transit peptide (e.g., Comai et al. (1988) J Biol Chem 263:15104-15109).

[0143] A variety of eukaryotic expression systems or prokaryotic expression systems such as bacterial, yeast, insect cell lines, plant and mammalian cells, are known to those of skill in the art. As explained briefly below, a recombinant polynucleotide disclosed herein can be expressed in these eukaryotic systems.

[0144] Synthesis of heterologous polynucleotides in yeast is well known (Sherman et al. (1982) Methods in Yeast Genetics, Cold Spring Harbor Laboratory). Two widely utilized yeasts for production of eukaryotic proteins are Saccharomyces cerevisiae and Pichia pastoris. Vectors, strains, and protocols for expression in Saccharomyces and Pichia are known in the art and available from commercial suppliers (e.g., Invitrogen). Suitable vectors usually have expression control sequences, such as promoters, including 3-phosphoglycerate kinase or alcohol oxidase, and an origin of replication, termination sequences and the like as desired.

[0145] A protein of the present invention, once expressed, can be isolated from yeast by lysing the cells and applying standard protein isolation techniques to the lists. The monitoring of the purification process can be accomplished by using Western blot techniques or radioimmunoassay of other standard immunoassay techniques.

[0146] The various recombinant sequences disclosed herein can also be ligated to various expression vectors for use in transfecting cell cultures of, for instance, mammalian, insect, or plant origin. Illustrative cell cultures useful for the production of the peptides are mammalian cells. A number of suitable host cell lines capable of expressing intact proteins have been developed in the art, and include the HEK293, BHK21, and CHO cell lines. Expression vectors for these cells can include expression control sequences, such as an origin of replication, a promoter (e.g. the CMV promoter, a HSV tk promoter or pgk (phosphoglycerate kinase) promoter), an enhancer (Queen et al. (1986) Immunol. Rev. 89:49), and necessary processing information sites, such as ribosome binding sites, RNA splice sites, polyadenylation sites (e.g., an SV40 large T Ag poly A addition site), and transcriptional terminator sequences. Other animal cells useful for production of proteins of the present invention are available, for instance, from the American Type Culture Collection.

[0147] Appropriate vectors for expressing the recombinant sequences disclosed herein in insect cells are usually derived from the SF9 baculovirus. Suitable insect cell lines include mosquito larvae, silkworm, armyworm, moth and Drosophila cell lines such as a Schneider cell line (See, Schneider (1987) J. Embryol. Exp. Morphol. 27:353-365).

[0148] As with yeast, when higher animal or plant host cells are employed, polyadenylation or transcription terminator sequences are typically incorporated into the vector. An example of a terminator sequence is the polyadenylation sequence from the bovine growth hormone gene. Sequences for accurate splicing of the transcript may also be included. An example of a splicing sequence is the VP1 intron from SV40 (Sprague et al. (1983) J Virol. 45:773-781). Additionally, gene sequences to control replication in the host cell may be incorporated into the vector such as those found in bovine papilloma virus type-vectors (Saveria-Campo (1985) DNA Cloning Vol. II a Practical Approach, D. M. Glover, Ed., IRL Press, Arlington, Va., pp. 213-238).

[0149] Animal and lower eukaryotic (e.g., yeast) host cells are competent or rendered competent for transfection by various means. There are several well-known methods of introducing DNA into animal cells. These include: calcium phosphate precipitation, fusion of the recipient cells with bacterial protoplasts containing the DNA, treatment of the recipient cells with liposomes containing the DNA, DEAE dextrin, electroporation, biolistics, and micro-injection of the DNA directly into the cells. The transfected cells are cultured by means well known in the art (Kuchler (1997) Biochemical Methods in Cell Culture and Virology, Dowden, Hutchinson and Ross, Inc.).

### X. Methods of Use

[0150] The various SU-dependent stabilization domains described herein, can be used in a variety of different methods to influence the level of a sequence of interest.

[0151] i. Methods of Using the Fusion Protein Comprising the SU-Dependent Stabilization Domain

[0152] In one embodiment, a method to modulate the stability of a polypeptide of interest in a cell is provided. The method comprises (a) providing a cell having a recombinant polynucleotide comprising a nucleotide sequence encoding a polypeptide having a SU-dependent stabilization domain operably linked to a polynucleotide encoding the polypeptide of interest; (b) expressing the recombinant polynucleotide in the cell; and, (c) contacting the cell with an effective amount of a SU ligand, wherein the effective amount of the SU ligand increases the level the polypeptide of interest in the cell. This method has the advantages of reducing genetic complexity to one expression cassette instead of two cassettes which are often required for transcriptional regulation (i.e., one for the target gene and one for the transcriptional activator/repressor) and, in some instance, this method could enable a quicker response to ligand as both transcription and translation would have already reached steady state. The promoter driving expression of the destabilized protein could be constitutive, spatio-temporal specific, or inducible. Accumulation of the target gene product in any cell type would be dependent on the presence of the stabilizing ligand.

[0153] In some embodiments, the SU-dependent stabilization domain comprises (a) a ligand binding domain of a SU chemically-regulated transcriptional regulator having at least one destabilization mutation; (b) a DNA binding domain of a SU chemically-regulated transcriptional regulator having at least one destabilization mutation; or (c) the SU-dependent stabilization domain comprises both (a) and (b). Various forms of such SU-dependent stabilization domains are described in further detail elsewhere herein. Such methods can further employ the use of an intein. Such constructs and how they are generated are discussed elsewhere herein.

[0154] In specific embodiments, the SU-dependent stabilization domain comprises a polypeptide having at least 80%, 85%, 90%, 91%, 92%, 93%, 94%, 95%, 96%, 97%, 98%, or 99% 100% sequence identity to the ligand binding domain of an amino acid sequence set forth in any one of SEQ ID NO:3-419, 863-870, and/or 884-889, wherein the polypeptide further comprises at least one destabilization mutation.

[0155] In further embodiments, the encoded polypeptide having the SU-dependent stabilization domain comprises a SU chemically-regulated transcriptional regulator. The SU chemically-regulated transcriptional regulator can comprise Su(R). In such instances, non-limiting examples of the SuR comprise polypeptides that share at least 80%, 85%, 90%, 91%, 92%, 93%, 94%, 95%, 96%, 97%, 98%, or 99% 100% sequence identity to any one of the polypeptides set forth any one of SEQ ID NO:3-411, 863-870, and/or 884-889, wherein said polypeptide further comprises at least one destabilization mutation.

[0156] In other embodiments, the SU chemically-regulated transcriptional regulator can comprise a revSuR. In such instances, non-limiting examples of the revSuR shares at least 80%, 85%, 90%, 91%, 92%, 93%, 94%, 95%, 96%, 97%, 98%, or 99% 100% sequence identity to any one of the polypeptides set forth any one of SEQ ID NO:412-419, wherein said polypeptide further comprises at least one destabilization mutation. When a revSuR is employed, in specific embodiments, the revSuR can further comprise a transcriptional activator domain.

[0157] In methods where the recombinant polynucleotide encodes a revSuR-TAD having at least one destabilization domain in the revSuR fused in frame to the polypeptide of interest, the recombination polynucleotide can be operably linked to any promoter, as disclosed herein, but in specific embodiments, the recombinant polynucleotide is operably linked to a promoter comprising at least one, two or three cognate operators for the encoded revSuR-TAD.

[0158] ii. Methods of Using the SU-Dependent Stabilization Domain in a Chemical-Gene Switch System

[0159] In other embodiments, methods to regulate expression in a host cell or plant are provided which employ a chemical-gene switch. Such methods comprise providing a cell (i.e., a plant cell) comprising (i) a first recombinant construct comprising a first promoter operably linked to a revSuR comprising a transcriptional activator domain, wherein the revSuR comprises a destabilization mutation; and, (ii) a second recombinant construct comprising a first ligand responsive promoter comprising at least one, two or three cognate operators for said revSuR operably linked to a polynucleotide of interest; providing the host cell (i.e, plant cell) with an effective amount of the SU ligand whereby the effective amount of the SU ligand increases the level of the revSuR-TAD and increases the level of polynucleotide of interest. In such methods, the revSuR-TAD is unstable in the absence of an effective concentration of SU ligand. The polynucleotide of interest is thereby expressed at the level of the minimal level of the ligand responsive promoter. In the presence of an effective concentration of SU ligand, the revSuR-TAD is stabilized and an increase in transcription from the ligand responsive promoter occurs.

[0160] In other methods, the destabilization mutation is found within the ligand binding domain of the revSuR; the DNA binding domain of the revSuR; or in both of the ligand binding domain and the DNA binding domain. Various forms of the revSuR and TAD that can be employed in these methods are disclosed in detail elsewhere herein.

[0161] In further embodiments, the first recombinant construct comprises a first promoter that is a ligand responsive promoter operably linked to a revSuR comprising a transcriptional activator domain, wherein the revSuR comprises a destabilization mutation. In such instances, the second ligand responsive promoter comprises at least one, two or three cognate operators for the revSuR-TAD. In still further embodiments, the cognate operator comprises the tet operator. In such embodiments, the presence of the effective concentration of SU ligand allows for an increase in expression of the revSuR-TAD.

[0162] The chemical-gene switch can thereby be employed in methods which stringently and/or specifically controlling expression of a polynucleotide of interest. Stringency and/or specificity of modulating can be influenced by selecting the combination of elements used in the switch. These include, but are not limited to each component of the chemical-gene switch. Further control is provided by selection, dosage, conditions, and/or timing of the application of the SU ligand. In some examples the expression of the polynucleotide of interest can be controlled more stringently, controlled in various tissues or cells, restricted to selected tissue or cell type, restricted to specific developmental stage(s), restricted to specific environmental conditions, and/or restricted to specific generation of a plant or progeny thereof.

[0163] In some examples, the methods and compositions comprises a chemical-gene switch which may comprise additional elements. In some examples, one or more additional elements may provide means by which expression of the polynucleotide of interest can be controlled more stringently, controlled in various tissues or cells, restricted to selected tissue or cell type, restricted to specific developmental stage(s), restricted to specific environmental conditions, and/or restricted to specific generation of a plant or progeny thereof. In some examples those elements include site-specific recombination sites, site-specific recombinases, or combinations thereof.

[0164] iii SU Ligands and Methods of Providing

[0165] Any SU ligand can be employed in the various methods disclosed herein, so long as the SU ligand is compatible with the SU-dependent stabilization domain and, when applicable, to the SuR or revSuR. A “cognate” SU ligand and SU-dependent stabilization domain are therefore compatible with one another.

[0166] A variety of SU compounds can be used as SU ligand. Sulfonylurea molecules comprise a sulfonylurea moiety (—S(O)₂NHC(O)NH(R)—). In sulfonylurea herbicides the sulfonyl end of the sulfonylurea moiety is connected either directly or by way of an oxygen atom or an optionally substituted amino or methylene group to a typically substituted cyclic or acyclic group. At the opposite end of the sulfonylurea bridge, the amino group, which may have a substituent such as methyl (R being CH₃) instead of hydrogen, is connected to a heterocyclic group, typically a symmetric pyrimidine or triazine ring, having one or two substituents such as methyl, ethyl, trifluoromethyl, methoxy, ethoxy, methylamino, dimethylamino, ethylamino and the halogens. Sulfonylurea herbicides can be in the form of the free acid or a salt. In the free acid form the sulfonamide nitrogen on the bridge is not deprotonated (i.e., —S(O)₂NHC(O)NH(R)), while in the salt form the sulfonamide nitrogen atom on the bridge is deprotonated, and a cation is present, typically of an alkali metal or alkaline earth metal, most commonly sodium or potassium. Sulfonylurea compounds include, for example, compound classes such as pyrimidinylsulfonylurea compounds, triazinylsulfonylurea compounds, thiadiazolylurea compounds, and pharmaceuticals such as antidiabetic drugs, as well as salts and other derivatives thereof. Examples of pyrimidinylsulfonylurea compounds include amidosulfuron, azimsulfuron, bensulfuron, bensulfuron-methyl, chlorimuron, chlorimuron-ethyl, cyclosulfamuron, ethoxysulfuron, flazasulfuron, flucetosulfuron, flupyrsulfuron, flupyrsulfuron-methyl, foramsulfuron, halosulfuron, halosulfuron-methyl, imazosulfuron, mesosulfuron, mesosulfuron-methyl, nicosulfuron, orthosulfamuron, oxasulfuron, primisulfuron, primisulfuron-methyl, pyrazosulfuron, pyrazosulfuron-ethyl, rimsulfuron, sulfometuron, sulfometuron-methyl, sulfosulfuron, trifloxysulfuron and salts and derivatives thereof. Examples of triazinylsulfonylurea compounds include chlorsulfuron, cinosulfuron, ethametsulfuron, ethametsulfuron-methyl, iodosulfuron, iodosulfuron-methyl, metsulfuron, metsulfuron-methyl, prosulfuron, thifensulfuron, thifensulfuron-methyl, triasulfuron, tribenuron, tribenuron-methyl, triflusulfuron, triflusulfuron-methyl, tritosulfuron and salts and derivatives thereof. Examples of thiadiazolylurea compounds include buthiuron, ethidimuron, tebuthiuron, thiazafluron, thidiazuron, pyrimidinylsulfonylurea compound (e.g., amidosulfuron, azimsulfuron, bensulfuron, chlorimuron, cyclosulfamuron, ethoxysulfuron, flazasulfuron, flucetosulfuron, flupyrsulfuron, foramsulfuron, halosulfuron, imazosulfuron, mesosulfuron, nicosulfuron, orthosulfamuron, oxasulfuron, primisulftiron, pyrazosulfuron, rimsulfuron, sulfometuron, sulfosulfuron and trifloxysulfuron); a triazinylsulfonylurea compound (e.g., chlorsulfuron, cinosulfuron, ethametsulfuron, iodosulfuron, metsulfuron, prosulfuron, thifensulfuron, triasulfuron, tribenuron, triflusulfuron and tritosulfuron); or a thiadazolylurea compound (e.g., cloransulam, diclosulam, florasulam, flumetsulam, metosulam, and penoxsulam) and salts and derivatives thereof. Examples of antidiabetic drugs include acetohexamide, chlorpropamide, tolbutamide, tolazamide, glipizide, gliclazide, glibenclamide (glyburide), gliquidone, glimepiride and salts and derivatives thereof. In some systems, the SuR polypeptides specifically bind to more than one sulfonylurea compound, so one can chose which SU ligand to apply to the plant.

[0167] In some examples, the sulfonylurea compound is selected from the group consisting of chlorsulfuron, ethametsulfuron-methyl, metsulfuron-methyl, thifensulfuron-methyl, sulfometuron-methyl, tribenuron-methyl, chlorimuron-ethyl, nicosulfuron, and rimsulfuron.

[0168] In other embodiments, the sulfonylurea compound comprises a pyrimidinylsulfonylurea, a triazinylsulfonylurea, a thiadazolylurea, a chlorosulfuron, an ethametsulfuron, a thifensulfuron, a metsulfuron, a sulfometuron, a tribenuron, a chlorimuron, a nicosulfuron, or a rimsulfuron compound.

[0169] In one embodiment, the ligand for the SU-dependent stabilization domain is ethametsulfuron. In some examples the ethametsulfuron is provided at a concentration of about 0.001, 0.002, 0.003, 0.004, 0.005, 0.006, 0.007, 0.008, 0.009, 0.01, 0.02, 0.03, 0.04, 0.05, 0.06, 0.07, 0.08, 0.09, 0.10, 0.15, 0.2, 0.25, 0.3, 0.35, 0.4, 0.45, 0.5, 0.55, 0.6, 0.65, 0.7, 0.75, 0.8, 0.85, 0.9, 0.95, 1.0, 1.5, 2.0, 2.5, 3.0, 3.5, 4.0, 4.5, 5.0, 5.5, 6.0, 6.5, 7.0, 7.5, 8.0, 8.5, 9.0, 9.5, 10, 11, 12, 13, 14, 15, 16, 17, 18, 19, 20, 25, 30, 35, 40, 45, 50, 55, 60, 65, 70, 75, 80, 85, 90, 100, 200 or 500 μg/ml or greater. In other examples, the ethametsulfuron is provided at a concentration of about at least 0.1, 0.5, 1, 1.5, 1.75, 2, 2.25, 2.5, 2.75, 3, 3.25, 3.5, 3.75, 4, 4.5, 5, 5.5, 6, 6.5, 7, 7.5, 8, 8.5, 9, 9.5, 10 or greater times the registered recommended rate for any particular crop. In yet other examples, the ethametsulfruon is provided at least about 0.5, 1, 2, 3, 4, 4, 5, 7, 8, 9, 10, 11, 12, 13, 14, 15, 16, 17, 18, 19, 20, 21, 22, 23, 24, or 25 or greater PPM. In some examples, ethametsulfuron-dependent stabilization domain employed comprises the ligand binding domain, the DNA binding domain or the full length SU chemically-regulated transcriptional regulator, wherein the ligand binding domain comprise at least 50% 60%, 65%, 66%, 67%, 68%, 69%, 70%, 71%, 72%, 73%, 74%, 75%, 76%, 77%, 78%, 79%, 80%, 81%, 82%, 83%, 84%, 85%, 86%, 87%, 88%, 89%, 90%, 91%, 92%, 93%, 94%, 95%, 96%, 97%, 98% or 99% sequence identity to the ligand binding domain, the DNA binding domain or the full length SU chemically-regulated transcriptional regulator of SEQ ID NO:3-419, 863-870, and/or 884-889, wherein the sequence identity is determined over the full length of the polypeptide using a global alignment method and said domain further comprises at least one destabilization mutation.

[0170] In other embodiments, the ligand for the SU-dependent stabilization domain is chlorsulfuron. In some examples, the chlorsulfuron is provided at a concentration of about 0.01, 0.02, 0.03, 0.04, 0.05, 0.06, 0.07, 0.08, 0.09, 0.10, 0.15, 0.2, 0.25, 0.3, 0.35, 0.4, 0.45, 0.5, 0.55, 0.6, 0.65, 0.7, 0.75, 0.8, 0.85, 0.9, 0.95, 1.0, 1.5, 2.0, 2.5, 3.0, 3.5, 4.0, 4.5, 5.0, 5.5, 6.0, 6.5, 7.0, 7.5, 8.0, 8.5, 9.0, 9.5, 10, 11, 12, 13, 14, 15, 16, 17, 18, 19, 20, 25, 30, 35, 40, 45, 50, 55, 60, 65, 70, 75, 80, 85, 90, 100, 200 or 500 μg/ml. In other examples, the chlorsulfuron is provided at a concentration of about at least 0.1, 0.5, 1, 1.5, 1.75, 2, 2.25, 2.5, 2.75, 3, 3.25, 3.5, 3.75, 4, 4.5, 5, 5.5, 6, 6.5, 7, 7.5, 8, 8.5, 9, 9.5, 10 or greater times the registered recommended rate for any particular crop. In yet other examples, the chlorsulfuron is provided at least about 0.5, 1, 2, 3, 4, 4, 5, 7, 8, 9, 10, 11, 12, 13, 14, 15, 16, 17, 18, 19, 20, 21, 22, 23, 24, or 25 or greater PPM. In some examples, chlorsulfuron-dependent stabilization domain employed comprises the ligand binding domain, the DNA binding domain or the full length SU chemically-regulated transcriptional regulator, wherein the ligand binding domain comprise at least 50% 60%, 65%, 66%, 67%, 68%, 69%, 70%, 71%, 72%, 73%, 74%, 75%, 76%, 77%, 78%, 79%, 80%, 81%, 82%, 83%, 84%, 85%, 86%, 87%, 88%, 89%, 90%, 91%, 92%, 93%, 94%, 95%, 96%, 97%, 98% or 99% sequence identity to the ligand binding domain, the DNA binding domain or the full length SU chemically-regulated transcriptional regulator of SEQ ID NO:3-419, 863-870, 884-889, 1193-1568 and/or 1949-2110, wherein the sequence identity is determined over the full length of the polypeptide using a global alignment method and the domain further comprises at least one destabilization mutation.

[0171] By “contacting” or “providing” to the host cell, plant or plant part is intended any method whereby an effective amount of the SU ligand is exposed to the host cell, plant, plant part, tissue or organ. The SU ligand can be applied to the plant or plant part by, for example, spraying, atomizing, dusting, scattering, coating or pouring, introducing into or on the soil, introducing into irrigation water, by seed treatment or general application or dusting at the desirable time for the purpose at hand. If tissue culture is being employed, the SU ligand can be added to the culture media.

[0172] By “effective amount” of the SU ligand is intended an amount of SU ligand that is sufficient to allow for the desirable level of expression of the polynucleotide sequence of interest in a desired host cell, host tissue, plant tissue or plant part. Generally, in reference to the fusion protein comprising the SU-dependent stabilization domain, the effective amount of the SU ligand is sufficient to increase the stability, level and/or activity of the polypeptide of interest that is fused in frame to the SU-dependent stabilization domain. In reference to the use of a SU-dependent stabilization domain in the context of the chemical-gene switch, the effective amount of the SU ligand is sufficient to influence transcription as desired for the given chemical-gene switch employed. In specific embodiments, the effective amount of the SU ligand does not significantly affect the host cell, plant or crop. The effective amount may or may not be sufficient to control weeds. When desired, the expression of the polynucleotide of interest alters the phenotype and/or the genome of the host cell or plant.

[0173] The SU ligand can be contacted to the plant in combination with an adjuvant or any other agent that provides a desired agricultural effect. As used herein, an “adjuvant” is any material added to a spray solution or formulation to modify the action of an agricultural chemical or the physical properties of the spray solution. See, for example, Green and Foy (2003) “Adjuvants: Tools for Enhancing Herbicide Performance,” in Weed Biology and Management, ed. Inderjit (Kluwer Academic Publishers, The Netherlands). Adjuvants can be categorized or subclassified as activators, acidifiers, buffers, additives, adherents, antiflocculants, antifoamers, defoamers, antifreezes, attractants, basic blends, chelating agents, cleaners, colorants or dyes, compatibility agents, cosolvents, couplers, crop oil concentrates, deposition agents, detergents, dispersants, drift control agents, emulsifiers, evaporation reducers, extenders, fertilizers, foam markers, formulants, inerts, humectants, methylated seed oils, high load COCs, polymers, modified vegetable oils, penetrators, repellants, petroleum oil concentrates, preservatives, rainfast agents, retention aids, solubilizers, surfactants, spreaders, stickers, spreader stickers, synergists, thickeners, translocation aids, uv protectants, vegetable oils, water conditioners, and wetting agents.

[0174] In addition, methods of the invention can comprise the use of a herbicide or a mixture of herbicides, as well as, one or more other insecticides, fungicides, nematocides, bactericides, acaricides, growth regulators, chemosterilants, semiochemicals, repellents, attractants, pheromones, feeding stimulants or other biologically active compounds or entomopathogenic bacteria, virus, or fungi to form a multi-component mixture giving an even broader spectrum of agricultural protection.

[0175] Methods can further comprise the use of plant growth regulators such as aviglycine, N-(phenylmethyl)-1H-purin-6-amine, ethephon, epocholeone, gibberellic acid, gibberellin A₄ and A₇, harpin protein, mepiquat chloride, prohexadione calcium, prohydrojasmon, sodium nitrophenolate and trinexapac-methyl, and plant growth modifying organisms such as Bacillus cereus strain BP01.

### XI. Novel Su Chemically-Regulated Transcriptional Regulators and Compositions and Methods Employing the Same

[0176] Further provided are methods and compositions which employ novel SU chemically-regulated transcriptional regulators. Non-limiting examples of these novel polynucleotides are set forth in SEQ ID NOS: 1193-1380 and 1949-2029 or active variants and fragments thereof and the encoded polypeptides set forth in SEQ ID NOS: 1381-1568 and 2030-2110 or active variants and fragments thereof.

[0177] Fragments and variants of SU chemically-regulated transcriptional regulators polynucleotides and polypeptides are also encompassed by the present invention. By “fragment” is intended a portion of the polynucleotide or a portion of the amino acid sequence and hence protein encoded thereby. Fragments of a polynucleotide may encode protein fragments that bind to a polynucleotide comprising an operator sequence, wherein the binding is regulated by a sulfonylurea compound. Alternatively, fragments of a polynucleotide that is useful as hybridization probes generally do not encode fragment proteins retaining biological activity. Thus, fragments of a nucleotide sequence may range from at least about 20 nucleotides, about 50 nucleotides, about 100 nucleotides, and up to the full-length polynucleotide encoding the SU chemically-regulated transcriptional regulators polypeptides.

[0178] A fragment of an SU chemically-regulated transcriptional regulators polynucleotide that encodes a biologically active portion of a SU chemically-regulated transcriptional regulator will encode at least 50, 75, 100, 150, 175, 200, 225, 250, 275, 300, 325, 350, 375, 400, 410, 415, 420, 425, 430, 435, or 440 contiguous amino acids, or up to the total number of amino acids present in a full-length SU chemically-regulated transcriptional regulators polypeptide. Fragments of an SU chemically-regulated transcriptional regulator polynucleotide that are useful as hybridization probes or PCR primers generally need not encode a biologically active portion of an SU chemically-regulated transcriptional regulator protein.

[0179] Thus, a fragment of an SU chemically-regulated transcriptional regulator polynucleotide may encode a biologically active portion of an SU chemically-regulated transcriptional regulator polypeptide, or it may be a fragment that can be used as a hybridization probe or PCR primer using methods disclosed below. A biologically active portion of an SU chemically-regulated transcriptional regulator polypeptide can be prepared by isolating a portion of one of the SU chemically-regulated transcriptional regulator polynucleotides, expressing the encoded portion of the SU chemically-regulated transcriptional regulator polypeptides (e.g., by recombinant expression in vitro), and assessing the activity of the portion of the SU chemically-regulated transcriptional regulator protein. Polynucleotides that are fragments of an SU chemically-regulated transcriptional regulator nucleotide sequence comprise at least 16, 20, 50, 75, 100, 150, 200, 250, 300, 350, 400, 450, 500, 550, 600, 650, 700, 800, 900, 1,000, 1,100, 1,200, 1,300, or 1,400 contiguous nucleotides, or up to the number of nucleotides present in a full-length SU chemically-regulated transcriptional regulator polynucleotide disclosed herein.

[0180] “Variant” protein is intended to mean a protein derived from the protein by deletion (i.e., truncation at the 5′ and/or 3′ end) and/or a deletion or addition of one or more amino acids at one or more internal sites in the native protein and/or substitution of one or more amino acids at one or more sites in the native protein. Variant proteins encompassed are biologically active, that is they continue to possess the desired biological activity of the native protein, that is, bind to a polynucleotide comprising an operator sequence, wherein the binding is regulated by a sulfonylurea compound. Such variants may result from, for example, genetic polymorphism or from human manipulation.

[0181] “Variants” is intended to mean substantially similar sequences. For polynucleotides, a variant comprises a polynucleotide having a deletion (i.e., truncations) at the 5′ and/or 3′ end and/or a deletion and/or addition of one or more nucleotides at one or more internal sites within the native polynucleotide and/or a substitution of one or more nucleotides at one or more sites in the native polynucleotide. As used herein, a “native” polynucleotide or polypeptide comprises a naturally occurring nucleotide sequence or amino acid sequence, respectively. For polynucleotides, conservative variants include those sequences that, because of the degeneracy of the genetic code, encode the amino acid sequence of one of the SU chemically-regulated transcriptional regulator polypeptides. Naturally occurring variants such as these can be identified with the use of well-known molecular biology techniques, as, for example, with polymerase chain reaction (PCR) and hybridization techniques as outlined below. Variant polynucleotides also include synthetically derived polynucleotides, such as those generated, for example, by using site-directed mutagenesis or gene synthesis but which still encode an SU chemically-regulated transcriptional regulator polypeptide.

[0182] Biologically active variants of an SU chemically-regulated transcriptional regulator polypeptide (and the polynucleotide encoding the same) will have at least about 75%, 80%, 85%, 90%, 91%, 92%, 93%, 94%, 95%, 96%, 97%, 98%, 99%, or more sequence identity to the polypeptide of any one of SEQ ID NO: 1381-1568 and 2030-2110 or with regard to any of the SU chemically-regulated transcriptional regulator polypeptides as determined by sequence alignment programs and parameters described elsewhere herein.

[0183] In still further embodiments, a biologically active variant of an SU chemically-regulated transcriptional regulator protein may differ from that protein by 200, 190, 180, 170, 160, 150, 140, 130, 120, 110, 100, 90, 80, 70, 60, 50, 40, 30, 25, 20, 19, 18, 17, 16 amino acid residues, as few as 1-15 amino acid residues, as few as 1-10, such as 6-10, as few as 10, 9, 8, 7, 6, 5, as few as 4, 3, 2, or even 1 amino acid residue.

[0184] The SU chemically-regulated transcriptional regulator polypeptide and the active variants and fragments thereof may be altered in various ways including amino acid substitutions, deletions, truncations, and insertions. Methods for such manipulations are generally known in the art. For example, amino acid sequence variants and fragments of the HPPD proteins can be prepared by mutations in the DNA. Methods for mutagenesis and polynucleotide alterations are well known in the art. See, for example, Kunkel (1985) Proc. Natl. Acad. Sci. USA 82:488-492; Kunkel et al. (1987) Methods in Enzymol. 154:367-382; U.S. Pat. No. 4,873,192; Walker and Gaastra, eds. (1983) Techniques in Molecular Biology (MacMillan Publishing Company, New York) and the references cited therein. Guidance as to appropriate amino acid substitutions that do not affect biological activity of the protein of interest may be found in the model of Dayhoff et al. (1978) Atlas of Protein Sequence and Structure (Natl. Biomed. Res. Found., Washington, D.C.), herein incorporated by reference. Conservative substitutions, such as exchanging one amino acid with another having similar properties, may be optimal.

[0185] Obviously, the mutations that will be made in the DNA encoding the variant must not place the sequence out of reading frame and optimally will not create complementary regions that could produce secondary mRNA structure. See, EP Patent Application Publication No. 75,444.

[0186] Variant polynucleotides and proteins also encompass sequences and proteins derived from a mutagenic and recombinogenic procedure such as DNA shuffling. With such a procedure, one or more different SU chemically-regulated transcriptional regulator coding sequences can be manipulated to create a new SU chemically-regulated transcriptional regulator possessing the desired properties. In this manner, libraries of recombinant polynucleotides are generated from a population of related sequence polynucleotides comprising sequence regions that have substantial sequence identity and can be homologously recombined in vitro or in vivo. For example, using this approach, sequence motifs encoding a domain of interest may be shuffled between the SU chemically-regulated transcriptional regulator sequences disclosed herein and other known SU chemically-regulated transcriptional regulator genes to obtain a new gene coding for a protein with an improved property of interest. Strategies for such DNA shuffling are known in the art. See, for example, Stemmer (1994) Proc. Natl. Acad. Sci. USA 91:10747-10751; Stemmer (1994) Nature 370:389-391; Crameri et al. (1997) Nature Biotech. 15:436-438; Moore et al. (1997) J Mol. Biol. 272:336-347; Zhang et al. (1997) Proc. Natl. Acad. Sci. USA 94:4504-4509; Crameri et al. (1998) Nature 391:288-291; and U.S. Pat. Nos. 5,605,793 and 5,837,458.

[0187] Polynucleotides encoding the SU chemically-regulated transcriptional regulator polypeptide and the active variants and fragments thereof can be introduced into any of the DNA constructs discussed herein and further can be operably linked to any promoter sequence of interest. These constructs can be introduced/expressed in a host cell such as bacteria, yeast, insect, mammalian, or plant cells. Details for such methods are disclosed elsewherein herein, as is a detailed list of plants and plant cells that the sequences can be introduced into. Thus, various host cells, plants and plant cells are provided comprising the novel SU chemically-regulated transcriptional activators, including but not limited to, monocots and dicot plants such as corn, alfalfa, sunflower, Brassica, soybean, cotton, safflower, peanut, sorghum, wheat, millet, tobacco, etc.

[0188] In one embodiment, the novel SuR can be designed to contain a variety of different DNA binding domains and thereby bind a variety of different operators and influence transcription. In one embodiment, the SuR polypeptide comprises a DNA binding domain that specifically binds to a tetracycline operator. Thus, in specific embodiments, the SuR polypeptide or the polynucleotide encoding the same can comprise a DNA binding domain, including but not limited to, an operator DNA binding domain from repressors included tet, lac, trp, phd, arg, LexA, phiCh1 repressor, lambda C1 and Cro repressors, phage X repressor, MetJ, phir1t rro, phi434 C1 and Cro repressors, RafR, gal, ebg, uxuR, exuR, ROS, SinR, PurR, FruR, P22 C2, TetC, AcrR, Bet1, Bm3R1, EnvR, QacR, MtrR, TcmR, Ttk, YbiH, YhgD, and mu Ner, or DNA binding domains in Interpro families including, but not limited to, IPR001647, IPR010982, and IPR01199, or an active variant or fragment thereof. Thus, the DNA binding specificity can be altered by fusing a SuR ligand binding domain to an alternate DNA binding domain. For example, the DNA binding domain from TetR class D can be fused to a SuR ligand binding domain to create SuR polypeptides that specifically bind to polynucleotides comprising a class D tetracycline operator. In some examples, a DNA binding domain variant or derivative can be used. For example, a DNA binding domain from a TetR variant that specifically recognizes a tetO-4C operator or a tetO-6C operator could be used (Helbl & Hillen (1998) J Mol Biol 276:313-318; Helbl et al. (1998) J Mol Biol 276:319-324).

[0189] In some examples, the chemically-regulated transcriptional repressor, or the polynucleotide encoding the same, includes a SuR polypeptide comprising a ligand binding domain comprising at least one amino acid substitution to a wild type tetracycline repressor protein ligand binding domain fused to a heterologous operator DNA binding domain which specifically binds to a polynucleotide comprising the operator sequence or derivative thereof, wherein repressor-operator binding is regulated by the absence or presence of a sulfonylurea compound. In specific embodiments, the heterologous operator DNA binding domain comprises a tetracycline operator sequence or active variant or fragment thereof, such that the repressor-operator binding is regulated by the absence or presence of a sulfonylurea compound.

[0190] In some examples, the SuR polypeptides, or polynucleotide encoding the same, comprise an amino acid substitution in the ligand binding domain of a wild type tetracycline repressor protein. In class B and D wild type TetR proteins, amino acid residues 6-52 represent the DNA binding domain. The remainder of the protein is involved in ligand binding and subsequent allosteric modification. For class B TetR residues 53-207 represent the ligand binding domain, while residues 53-218 comprise the ligand binding domain for the class D TetR. In some embodiments, the SuR polypeptides comprise at least one amino acid substitution in the ligand binding domain of a wild type TetR(B) protein, while in further examples, the SuR polypeptides comprise at least one amino acid substitution in the ligand binding domain of a wild type TetR(B) protein of SEQ ID NO:1.

[0191] In non-limiting embodiments, the SuR polypeptides can have an equilibrium binding constant for a sulfonylurea compound greater than 0.1 nM and less than 10 μM. In some examples, the SuR polypeptide has an equilibrium binding constant for a sulfonylurea compound of at least 0.1 nM, 0.5 nM, 1 nM, 10 nM, 50 nM, 100 nM, 250 nM, 500 nM, 750 nM, 1 μM, 5 μM, 7 μM but less than 10 μM. In other examples, the SuR polypeptide has an equilibrium binding constant for a sulfonylurea compound of at least 0.1 nM, 0.5 nM, 1 nM, 10 nM, 50 nM, 100 nM, 250 nM, 500 nM, 750 nM but less than 1 μM. In some embodiments, the SuR polypeptide has an equilibrium binding constant for a sulfonylurea compound greater than 0 nM, but less than 0.1 nM, 0.5 nM, 1 nM, 10 nM, 50 nM, 100 nM, 250 nM, 500 nM, 750 nM, 1 μM, 5 μM, 7 μM or 10 μM. In some examples, the sulfonylurea compound is a chlorsulfuron, an ethametsulfuron, a metsulfuron, a sulfometuron, a tribenuron, a chlorimuron, a nicosulfuron, a rimsulfuron and/or a thifensulfuron. In further embodiments, the SuR as set forth in SEQ ID NOS: 1381-1568 and 2030-2110 has an equilibrium binding constant for chlorsulruon. In other embodiments, the SuR as set forth in SEQ ID NO: 1381-1568 and 2030-2110 has an equilibrium binding constant for ethametsulfuron.

[0192] In some examples, the SuR polypeptides have an equilibrium binding constant for an operator sequence greater than 0.1 nM and less than 10 μM. In some examples the SuR polypeptide has an equilibrium binding constant for an operator sequence of at least 0.1 nM, 0.5 nM, 1 nM, 10 nM, 50 nM, 100 nM, 250 nM, 500 nM, 750 nM, 1 μM, 5 μM, 7 μM but less than 10 μM. In some examples, the SuR polypeptide has an equilibrium binding constant for an operator sequence of at least 0.1 nM, 0.5 nM, 1 nM, 10 nM, 50 nM, 100 nM, 250 nM, 500 nM, 750 nM but less than 1 μM. In some examples the SuR polypeptide has an equilibrium binding constant for an operator sequence greater than 0 nM, but less than 0.1 nM, 0.5 nM, 1 nM, 10 nM, 50 nM, 100 nM, 250 nM, 500 nM, 750 nM, 1 μM, 5 μM, 7 μM or 10 μM. In some examples, the operator sequence is a Tet operator sequence. In some examples, the Tet operator sequence is a TetR(A) operator sequence, a TetR(B) operator sequence, a TetR(D) operator sequence, TetR(E) operator sequence, a TetR(H) operator sequence, or a functional derivative thereof.

[0193] Various chemical ligands, including exemplary sulfonylurea chemical ligands, and the level and manner of application are discussed in detail elsewhere herein.

[0194] Various methods of employing Non-limiting examples of SuR polypeptides are set forth in U.S. Utility application Ser. No. 13/086,765, filed on Apr. 14, 2011 and in US Application Publication 2010-0105141, both of which are herein incorporated by reference in their entirety. Briefly, methods are further provided to regulate expression in a plant. The method comprises (a) providing a plant comprising (i) a first polynucleotide construct comprising a polynucleotide encoding a chemically-regulated transcriptional repressor operably linked to a promoter active in said plant, and, (ii) a second polynucleotide construct comprising a polynucleotide of interest operably linked to a first repressible promoter; wherein said first repressible promoter comprises at least one operator, wherein said chemically-regulated transcriptional repressor can bind to said operators in the absence of a chemical ligand and thereby repress transcription from said first repressible promoter in the absence of said chemical ligand, and wherein said plant is tolerant to said chemical ligand; (b) providing the plant with an effective amount of the chemical ligand whereby expression of said polynucleotide of interest are increased.

### XII. Sequence Identity

[0195] As used herein, “sequence identity” or “identity” in the context of two polynucleotides or polypeptide sequences makes reference to the residues in the two sequences that are the same when aligned for maximum correspondence over a specified comparison window. When percentage of sequence identity is used in reference to proteins it is recognized that residue positions which are not identical often differ by conservative amino acid substitutions, where amino acid residues are substituted for other amino acid residues with similar chemical properties (e.g., charge or hydrophobicity) and therefore do not change the functional properties of the molecule. When sequences differ in conservative substitutions, the percent sequence identity may be adjusted upwards to correct for the conservative nature of the substitution. Sequences that differ by such conservative substitutions are said to have “sequence similarity” or “similarity”. Means for making this adjustment are well known to those of skill in the art. Typically this involves scoring a conservative substitution as a partial rather than a full mismatch, thereby increasing the percentage sequence identity. Thus, for example, where an identical amino acid is given a score of 1 and a non-conservative substitution is given a score of zero, a conservative substitution is given a score between zero and 1. The scoring of conservative substitutions is calculated, e.g., as implemented in the program PC/GENE (Intelligenetics, Mountain View, Calif.).

[0196] As used herein, “percentage of sequence identity” means the value determined by comparing two optimally aligned sequences over a comparison window, wherein the portion of the polynucleotide sequence in the comparison window may comprise additions or deletions (i.e., gaps) as compared to the reference sequence (which does not comprise additions or deletions) for optimal alignment of the two sequences. The percentage is calculated by determining the number of positions at which the identical nucleic acid base or amino acid residue occurs in both sequences to yield the number of matched positions, dividing the number of matched positions by the total number of positions in the window of comparison, and multiplying the result by 100 to yield the percentage of sequence identity.

[0197] Unless otherwise stated, sequence identity/similarity values provided herein refer to the value obtained using GAP Version 10 using the following parameters: % identity and % similarity for a nucleotide sequence using GAP Weight of 50 and Length Weight of 3, and the nwsgapdna.cmp scoring matrix; % identity and % similarity for an amino acid sequence using GAP Weight of 8 and Length Weight of 2, and the BLOSUM62 scoring matrix; or any equivalent program thereof. By “equivalent program” is intended any sequence comparison program that, for any two sequences in question, generates an alignment having identical nucleotide or amino acid residue matches and an identical percent sequence identity when compared to the corresponding alignment generated by GAP Version 10.

[0198] By “fragment” is intended a portion of the polynucleotide. fragments of a nucleotide sequence may range from at least about 10, about 15, 20 nucleotides, about 50 nucleotides, about 75 nucleotides, about 100 nucleotides, 200 nucleotides, 300 nucleotides, 400 nucleotides, 500 nucleotides, 600 nucleotides, 700 nucleotides and up to the full-length any polynucleotide of the chemical-gene switch system. Methods to assay for the activity of a desired polynucleotide or polypeptide are described elsewhere herein.

[0199] “Variants” is intended to mean substantially similar sequences. For polynucleotides or polypeptides, a variant comprises a deletion and/or addition of one or more nucleotides or amino acids at one or more internal sites within the native polynucleotide or polypeptide and/or a substitution of one or more nucleotides or amino acids at one or more sites in the original polynucleotide or original polypeptide. Generally, variants of a particular polynucleotide or polypeptide employed herein having the desired activity will have at least about 40%, 45%, 50%, 55%, 60%, 65%, 70%, 75%, 80%, 85%, 90%, 91%, 92%, 93%, 94%, 95%, 96%, 97%, 98%, 99% or more sequence identity to that particular polynucleotide or polypeptide as determined by sequence alignment programs and parameters described elsewhere herein.

[0200] A nucleic acid or polypeptide is “recombinant” when it is artificial or engineered, or derived from an artificial or engineered protein or nucleic acid. For example, a polynucleotide that is inserted into a vector or any other heterologous location, e.g, in a genome of a recombinant organism, such that it is not associated with nucleotide sequences that normally flank the polynucleotide as it is found in nature is a recombinant polynucleotide. A protein expressed in vitro or in vivo from a recombinant polynucleotide is an example of a recombinant polypeptide. Likewise, a polynucleotide sequence that does not appear in nature, for example a variant of a naturally occurring gene, is recombinant.

[0201] An “isolated” or “purified” polynucleotide or polypeptide or biologically active fragment or variant thereof, is substantially free of other cellular material, or culture medium when produced by recombinant techniques, or substantially free of chemical precursors or other chemicals when chemically synthesized. Preferably, an “isolated” nucleic acid is free of sequences (preferably protein encoding sequences) that naturally flank the nucleic acid (i.e., sequences located at the 5′ and 3′ ends of the nucleic acid) in the genomic DNA of the organism from which the nucleic acid is derived. For purposes of the invention, “isolated” when used to refer to nucleic acid molecules excludes isolated chromosomes. For example, in various embodiments, the isolated nucleic acid molecules can contain less than about 5 kb, 4 kb, 3 kb, 2 kb, 1 kb, 0.5 kb, or 0.1 kb of nucleotide sequences that naturally flank the nucleic acid molecule in genomic DNA of the cell from which the nucleic acid is derived. Non-limiting embodiments include:

[0202] 1. A recombinant polynucleotide comprising a nucleotide sequence encoding a polypeptide having a sulfonylurea (SU)-dependent stabilization domain.

[0203] 2. The recombinant polynucleotide of embodiment 1, wherein said SU-dependent stabilization domain comprises
[0204] (a) a ligand binding domain of a SU chemically-regulated transcriptional regulator having at least one destabilization mutation;
[0205] (b) a DNA binding domain of a SU chemically-regulated transcriptional regulator having at least one destabilization mutation; or
[0206] (c) said SU-dependent stabilization domain comprises both (a) and (b).

[0207] 3. The recombinant polynucleotide of embodiment 1 or 2, wherein the ligand binding domain of the SU chemically-regulated transcriptional regulator comprises a polypeptide having at least 80%, 85%, 90%, or 95% sequence identity to the ligand binding domain of an amino acid sequences sequence set forth in any one of SEQ ID NO:3-419, wherein said polypeptide further comprises at least one destabilization mutation.

[0208] 4. The recombinant polynucleotide of any one of embodiments 1-3, wherein the encoded polypeptide having the SU-dependent stabilization domain comprises a SU chemically-regulated transcriptional regulator.

[0209] 5. The recombinant polynucleotide of embodiment 4, wherein the SU chemically-regulated transcriptional regulator comprise a reverse SU chemically-regulated transcriptional repressor (revSuR).

[0210] 6. The recombinant polynucleotide of embodiment 4, wherein said SuR shares at least 80%, 85%, 90%, or 95% sequence identity to any one of the polypeptides set forth in SEQ ID NO:3-411, wherein said polypeptide further comprises at least one destabilization mutation.

[0211] 7. The recombinant polynucleotide of embodiment 5, wherein said revSuR shares at least 80%, 85%, 90%, or 95% sequence identity to any one of the polypeptides set forth any one of SEQ ID NO:412-419, wherein said polypeptide further comprises at least one destabilization mutation.

[0212] 8. The recombinant polynucleotide of embodiment 5 or 7, wherein the revSuR further comprises a transcriptional activator.

[0213] 9. The recombinant polynucleotide of any one of embodiments 2-7, wherein said destabilization mutation comprises the L17G mutation, the G96R mutation, or any combination thereof.

[0214] 10. The recombinant polynucleotide of embodiment 8, wherein said destabilization mutation comprises the L17G mutation, the G96R mutation, or any combination thereof.

[0215] 11. The recombinant polynucleotide of any one of embodiments 1-10, wherein said nucleotide sequence encoding the polypeptide having the SU-dependent stabilization domain is operably linked to a polynucleotide encoding a polypeptide of interest.

[0216] 12. The recombinant polynucleotide of embodiment 11, further comprises a nucleotide sequence encoding an intein.

[0217] 13. The recombinant polynucleotide of any one of embodiments 1-12, wherein said SU comprises a pyrimidinylsulfonylurea, a triazinylsulfonylurea, a thiadazolylurea, a chlorosulfuron, an ethametsulfuron, a thifensulfuron, a metsulfuron, a sulfometuron, a tribenuron, a chlorimuron, a nicosulfuron, or a rimsulfuron compound.

[0218] 14. A DNA construct comprising the polynucleotide of any one of embodiments 1-13, wherein said recombinant polynucleotide is operably linked to a promoter.

[0219] 15. The DNA construct of embodiment 14, wherein said promoter is a ligand responsive promoter comprising a least one, two or three cognate operators for said encoded SU chemically-regulated transcriptional regulator.

[0220] 16. The DNA construct of embodiment 15, wherein said cognate operator comprises the tet operator.

[0221] 17. The DNA construct of embodiment 14, wherein said promoter is a constitutive promoter, tissue-specific promoter, or an inducible promoter.

[0222] 18. A cell having the recombinant polynucleotide of any one of embodiments 1-14 or the DNA construct of any one of embodiments 15-17.

[0223] 19. The cell of embodiment 18, wherein said cell is a plant cell.

[0224] 20. The plant cell of embodiment 19, wherein said plant cell is from a monocot or dicot.

[0225] 21. The plant cell of embodiment 20, wherein said plant cell is from maize, barley, millet, wheat, rice, sorghum, rye, soybean, canola, alfalfa, sunflower, safflower, sugarcane, tobacco, Arabidopsis, or cotton.

[0226] 22. A plant comprising the cell of any one of embodiments 19-21.

[0227] 23. A transgenic seed of the plant of embodiment 22, wherein said seed comprises said recombinant polynucleotide.

[0228] 24. A recombinant polypeptide encoded by the polynucleotide of any one of embodiments 1-14.

[0229] 25. A method to modulate the stability of a polypeptide of interest in a cell comprising:

[0230] a) providing a cell having a recombinant polynucleotide comprising a nucleotide sequence encoding a polypeptide having a sulfonylurea (SU)-dependent stabilization domain operably linked to a polynucleotide encoding the polypeptide of interest;

[0231] b) expressing the recombinant polynucleotide in the cell; and,

[0232] c) contacting the cell with an effective amount of a SU ligand, wherein the effective amount of the SU ligand increases the level the polypeptide of interest in the cell.

[0233] 26. The method of embodiment 25, wherein said recombinant polynucleotide further comprises a nucleotide sequence encoding an intein, wherein the presence of the effective amount of the SU ligand allows for the splicing of the polypeptide of interest from the SU-dependent stabilization domain.

[0234] 27. The method of embodiment 25 or 26, wherein said SU-dependent stabilization domain comprises
[0235] (a) a ligand binding domain of a SU chemically-regulated transcriptional regulator having at least one destabilization mutation;
[0236] (b) a DNA binding domain of a SU chemically-regulated transcriptional regulator having at least one destabilization mutation; or
[0237] (c) said SU-dependent stabilization domain comprises both (a) and (b).

[0238] 28. The method of embodiment 27, wherein the SU-dependent stabilization domain comprises a polypeptide having at least 80%, 85%, 90% or 95% sequence identity to the ligand binding domain of an amino acid sequence set forth in any one of SEQ ID NO:3-419, wherein said polypeptide further comprises at least one destabilization mutation.

[0239] 29. The method of any one of embodiments 25-28, wherein the encoded polypeptide having the SU-dependent stabilization domain comprises a SU chemically-regulated transcriptional regulator.

[0240] 30. The method of embodiment 29, wherein the SU chemically-regulated transcriptional regulator comprises a reverse SU chemically-regulated transcriptional repressor (revSuR).

[0241] 31. The method of embodiment 29, wherein said SuR shares at least 80%, 85%, 90%, or 95% sequence identity to any one of the polypeptides set forth any one of SEQ ID NO:3-411, wherein said polypeptide further comprises at least one destabilization mutation.

[0242] 32. The method of embodiment 30, wherein said revSuR shares at least 80%, 85%, 90%, or 95% sequence identity to any one of the polypeptides set forth any one of SEQ ID NO:412-419, wherein said polypeptide further comprises at least one destabilization mutation.

[0243] 33. The method of any one of embodiments 30 or 32, wherein the revSuR further comprises a transcriptional activator domain.

[0244] 34. The method of embodiment 33, wherein said recombinant polynucleotide is operably linked to a promoter comprising at least one, two or three cognate operators for said encoded revSuR.

[0245] 35. The method of embodiment 34, wherein said cognate operator comprises the tet operator.

[0246] 36. The method of embodiment 33, wherein said recombinant polynucleotide is operably linked to a constitutive promoter, tissue-specific promoter, or an inducible promoter.

[0247] 37. The method of any one of embodiments 25-36, wherein said destabilization mutation comprises the L17G mutation, the G96R mutation, or any combination thereof.

[0248] 38. The method of any of embodiments 25-37, wherein said SU ligand comprises a pyrimidinylsulfonylurea, a triazinylsulfonylurea, a thiadazolylurea, a chlorosulfuron, an ethametsulfuron, a thifensulfuron, a metsulfuron, a sulfometuron, a tribenuron, a chlorimuron, a nicosulfuron, or a rimsulfuron compound.

[0249] 39. The method of any one of embodiments 25-38, wherein said cell is a plant cell.

[0250] 40. The method of embodiment 39, wherein said plant cell is in a plant.

[0251] 41. The method of embodiment 40, wherein said plant cell is a monocot.

[0252] 42. The method of embodiment 40, wherein said plant cell is a dicot.

[0253] 43. The method of embodiment 42, wherein said plant cell is from maize, barley, millet, wheat, rice, sorghum, rye, soybean, canola, alfalfa, sunflower, safflower, sugarcane, tobacco, Arabidopsis, or cotton.

[0254] 44. The method of any one of embodiments 25-43, wherein said chemical ligand is provided by spraying.

[0255] 45. A cell comprising
[0256] a) a first recombinant construct comprising a first promoter operably linked to a SU chemically-regulated transcriptional regulator comprising a reverse SU repressor (revSuR) comprising a transcriptional activator domain, wherein said revSuR comprises a destabilization mutation; and,
[0257] b) a second recombinant construct comprising a first ligand responsive promoter comprising at least one, two or three cognate operators for said SU chemically-regulated transcriptional activator operably linked to a polynucleotide of interest.

[0258] 46. The cell of embodiment 45, wherein said destabilization mutation is found within
[0259] (a) a ligand binding domain of the revSuR;
[0260] (b) a DNA binding domain of the revSuR; or
[0261] (c) both said ligand binding domain and said DNA binding domain.

[0262] 47. The cell of embodiment 45 or 46, wherein said revSuR shares at least 80%, 85%, 90%, or 95% sequence identity to any one of the polypeptides set forth any one of SEQ ID NO:412-419, wherein said polypeptide further comprises at least one destabilization mutation.

[0263] 48. The cell of embodiment 45, 46 or 47, wherein said destabilization mutation comprises the L17G mutation, the G96R mutation, or any combination thereof.

[0264] 49. The cell of any one of embodiments 45-48, wherein said first promoter is a second ligand responsive promoter, a constitutive promoter, tissue-specific promoter, or an inducible promoter.

[0265] 50. The cell of embodiment 49, wherein said second ligand responsive promoter comprises at least one, two, three, four, five, six, seven or more cognate operators for said revSuR.

[0266] 51. The cell of any one of embodiments 45-50, wherein said cognate operator comprises the tet operator.

[0267] 52. The cell of any one of embodiments 45-51, wherein said SU ligand comprises a pyrimidinylsulfonylurea, a triazinylsulfonylurea, a thiadazolylurea, a chlorosulfuron, an ethametsulfuron, a thifensulfuron, a metsulfuron, a sulfometuron, a tribenuron, a chlorimuron, a nicosulfuron, or a rimsulfuron compound.

[0268] 53. The cell of any one of embodiments 45-52, wherein said cell is a plant cell.

[0269] 54. The cell of embodiment 53, wherein said plant cell is a monocot or dicot.

[0270] 55. The cell of embodiment 54, wherein said plant cell is from maize, barley, millet, wheat, rice, sorghum, rye, soybean, canola, alfalfa, sunflower, safflower, sugarcane, tobacco, Arabidopsis, or cotton.

[0271] 56. The cell of any one of embodiments 53-55, wherein said plant cell is in a plant.

[0272] 57. A transgenic seed of the plant of embodiment 56, wherein said seed comprises said first and said second recombinant construct.

[0273] 58. A method to regulate expression in a plant, comprising
[0274] (a) providing a cell comprising
   [0275] (i) a first recombinant construct comprising a first promoter operably linked to a SU chemically-regulated transcriptional regulator comprising a reverse SU repressor (revSuR) comprising a transcriptional activator domain, wherein said revSuR comprises a destabilization mutation; and,
   [0276] (ii) a second recombinant construct comprising a first ligand responsive promoter comprising at least one, two or three cognate operators for said revSuR operably linked to a polynucleotide of interest; and,
[0277] (b) providing the cell with an effective amount of the SU ligand whereby the effective amount of the SU ligand increases the level of the revSuR and increases the level of polynucleotide of interest.

[0278] 59. The method of embodiment 58, wherein said destabilization mutation is found within
[0279] (a) a ligand binding domain of the revSuR;
[0280] (b) a DNA binding domain of the revSuR; or
[0281] (c) both said ligand binding domain and said DNA binding domain.

[0282] 60. The method of embodiment 58 and 59, wherein said revSuR shares at least 80%, 85%, 90%, or 95% sequence identity to any one of the polypeptides set forth any one of SEQ ID NO:412-419, wherein said polypeptide further comprises at least one destabilization mutation.

[0283] 61. The method of embodiment 58, 59, or 60, wherein said destabilization mutation comprises the L17G mutation, the G96R mutation, or any combination thereof.

[0284] 62. The method of any one of embodiments 58-61, wherein said first promoter is a second ligand responsive promoter.

[0285] 63. The method of embodiment 62, wherein said second ligand responsive promoter comprises at least one, two or three cognate operators for said revSuR.

[0286] 64. The method of any one of embodiments 58-63, wherein said cognate operator comprises the tet operator.

[0287] 65. The method of any one of embodiments 58-64, wherein said SU ligand comprises a pyrimidinylsulfonylurea, a triazinylsulfonylurea, a thiadazolylurea, a chlorosulfuron, an ethametsulfuron, a thifensulfuron, a metsulfuron, a sulfometuron, a tribenuron, a chlorimuron, a nicosulfuron, or a rimsulfuron compound.

[0288] 66. The method of any one of embodiments 58-65, wherein said cell is a plant cell.

[0289] 67. The method of embodiment 66, wherein said plant cell is a monocot or dicot.

[0290] 68. The method of embodiment 67, wherein said plant cell is from maize, barley, millet, wheat, rice, sorghum, rye, soybean, canola, alfalfa, sunflower, safflower, sugarcane, tobacco, Arabidopsis, or cotton.

[0291] 69. The method of any one of embodiments 66-68, wherein said plant cell is in a plant.

TABLE 1A
Summary of SEQ ID NOS.

| SEQ ID NO | Brief Description |
|---|---|
| 1 | Amino acid sequence of TetR(B) |
| 2 | Amino acid sequence of a variant of SEQ ID NO: 1 |
| 3-13 | Amino acid sequence for some SuR polypeptides |
| 14-204 | Amino acid sequence for SuR polypeptides that can employ |
| | ethametsulfuron as a SU ligand |
| 205-419 | Amino acid sequence for SuR polypeptides that can employ |
| | chlorsulfuron a SU ligand. |
| 412-419 | Amino acid sequence of SuR polypeptides with reverse |
| | repressor activity |
| 420-430 | Nucleic acid sequence encoding SEQ ID NO: 3-13 |
| 431-621 | Nucleic acid sequence encoding SEQ ID NO: 431-621 |
| 622-836 | Nucleic acid sequence encoding SEQ ID NO: 405-419 |
| 837-840 | oligonucleotides |
| 841-847 | Various constructs |
| 848 | Tet operator sequence |
| 849 | Plant actin promoter |
| 850 | banana streak virus promoter (BSV) |
| 851 | a mirabilis mosaic virus promoter |
| 852 | enhanced MMV promoter (dMMV) |
| 853 | plant P450 promoter (MP1) |
| 854 | elongation factor la (EF1A) promoter |
| 855 | Plant actin promoter with tet op (actin/Op) |
| 856 | Banana steak virus promoter with tet op (BSV/Op) |
| 857 | mirabilis mosaic virus promoter with tet op (MMV/Op) |
| 858 | enhanced MMV promoter with tet op (dMMV/Op) |
| 859 | plant P450 promoter with tet op (MP1/0p) |
| 860 | elongation factor la promoter with tet op (EF1A/Op) |
| 861 | 35S CaMV promoter with ADH1 intron |
| 862 | 35S CaMV promoter engineered with tet operators |
| 863 | Amino acid sequence for L13-23, an EsR |
| 864 | Amino acid sequence for L15-20, an EsR |
| 865 | Amino acid sequence for L15-20-M4, an EsR |
| 866 | Amino acid sequence for L15-20-M9, an EsR |
| 867 | Amino acid sequence for L15-20-M34, an EsR |
| 868 | Amino acid sequence for CsL4.2-20, an CsR having the |
| | L17G mutation |
| 869 | Amino acid sequence for CsL4.2-15, an CsR |
| 870 | Amino acid sequence for CsL4.2-20, an CsR |
| 871-883 | Various oligonucleotides |
| 884 | Amino acid sequence for L13-23, an EsR, having the L17G |
| | mutation |
| 885 | Amino acid sequence for L15-20, an EsR having the L17G |
| | mutation |
| 886 | Amino acid sequence for L15-20-M4, an EsR having the |
| | L17G mutation |
| 887 | Amino acid sequence for L15-20-M9, an EsR having the |
| | L17G mutation |
| 888 | Amino acid sequence for L15-20-M34, an EsR having the |
| | L17G mutation |
| 889 | Amino acid sequence for CsL4.2-15, an CsR having the |
| | L17G mutation |

TABLE 1B
Additional information on SEQ ID NOS

| SEQ ID | | Description/clone |
|---|---|---|
| NO | type | name |
| 3 | AA | L1-02 |
| 4 | AA | L1-07 |
| 5 | AA | L1-09 |
| 6 | AA | L1-20 |
| 7 | AA | L1-22 |
| 8 | AA | L1-24 |
| 9 | AA | L1-28 |
| 10 | AA | L1-29 |
| 11 | AA | L1-31 |
| 12 | AA | L1-38 |
| 13 | AA | L1-44 |
| 14 | AA | L6-1B03 |
| 15 | AA | L6-1C03 |
| 16 | AA | L6-1C06 |
| 17 | AA | L6-1G06 |
| 18 | AA | L6-1G07 |
| 19 | AA | L6-1G09 |
| 20 | AA | L6-1G10 |
| 21 | AA | L6-1G11 |
| 22 | AA | L6-1H12 |
| 23 | AA | L6-2A01 |
| 24 | AA | L6-2A02 |
| 25 | AA | L6-2A04 |
| 26 | AA | L6-2A06 |
| 27 | AA | L6-2A12 |
| 28 | AA | L6-2B04 |
| 29 | AA | L6-2B06 |
| 30 | AA | L6-2B08 |
| 31 | AA | L6-2B09 |
| 32 | AA | L6-2B10 |
| 33 | AA | L6-2B11 |
| 34 | AA | L6-2C02 |
| 35 | AA | L6-2C05 |
| 36 | AA | L6-2C09 |
| 37 | AA | L6-2C10 |
| 38 | AA | L6-2C11 |
| 39 | AA | L6-2D01 |
| 40 | AA | L6-2D02 |
| 41 | AA | L6-2D03 |
| 42 | AA | L6-2D04 |
| 43 | AA | L6-2D07 |
| 44 | AA | L6-2D11 |
| 45 | AA | L6-2D12 |
| 46 | AA | L6-2E02 |
| 47 | AA | L6-2E03 |
| 48 | AA | L6-2E04 |
| 49 | AA | L6-2E05 |
| 50 | AA | L6-2E07 |
| 51 | AA | L6-2E08 |
| 52 | AA | L6-2E09 |
| 53 | AA | L6-2E11 |
| 54 | AA | L6-2F08 |
| 55 | AA | L6-2F10 |
| 56 | AA | L6-2F11 |
| 57 | AA | L6-2F12 |
| 58 | AA | L6-2G01 |
| 59 | AA | L6-2G02 |
| 60 | AA | L6-2G03 |
| 61 | AA | L6-2G05 |
| 62 | AA | L6-2G10 |
| 63 | AA | L6-2H01 |
| 64 | AA | L6-2H02 |
| 65 | AA | L6-2H03 |
| 66 | AA | L6-2H04 |
| 67 | AA | L6-2H06 |
| 68 | AA | L6-2H07 |
| 69 | AA | L6-2H10 |
| 70 | AA | L6-2H11 |
| 71 | AA | L6-3A01 |
| 72 | AA | L6-3A02 |
| 73 | AA | L6-3A03 |
| 74 | AA | L6-3A06 |
| 75 | AA | L6-3A11 |
| 76 | AA | L6-3B08 |
| 77 | AA | L6-3B09 |
| 78 | AA | L6-3C02 |
| 79 | AA | L6-3C04 |
| 80 | AA | L6-3C05 |
| 81 | AA | L6-3C06 |
| 82 | AA | L6-3D03 |
| 83 | AA | L6-3D05 |
| 84 | AA | L6-3D09 |
| 85 | AA | L6-3E08 |
| 86 | AA | L6-3E09 |
| 87 | AA | L6-3E10 |
| 88 | AA | L6-3F02 |
| 89 | AA | L6-3F09 |
| 90 | AA | L6-3F12 |
| 91 | AA | L6-3G03 |
| 92 | AA | L6-3G05 |
| 93 | AA | L6-3G09 |
| 94 | AA | L6-3H02 |
| 95 | AA | L6-3H05 |
| 96 | AA | L6-3H08 |
| 97 | AA | L6-4A01 |
| 98 | AA | L6-4A03 |
| 99 | AA | L6-4A04 |
| 100 | AA | L6-4A09 |
| 101 | AA | L6-4A10 |
| 102 | AA | L6-4A11 |
| 103 | AA | L6-4B05 |
| 104 | AA | L6-4B06 |
| 105 | AA | L6-4B07 |
| 106 | AA | L6-4B08 |
| 107 | AA | L6-4B12 |
| 108 | AA | L6-4C01 |
| 109 | AA | L6-4C03 |
| 110 | AA | L6-4C04 |
| 111 | AA | L6-4C07 |
| 112 | AA | L6-4C08 |
| 113 | AA | L6-4C09 |
| 114 | AA | L6-4C10 |
| 115 | AA | L6-4C11 |
| 116 | AA | L6-4D09 |
| 117 | AA | L6-4D10 |
| 118 | AA | L6-4E01 |
| 119 | AA | L6-4E02 |
| 120 | AA | L6-4E03 |
| 121 | AA | L6-4E05 |
| 122 | AA | L6-4E08 |
| 123 | AA | L6-4E09 |
| 124 | AA | L6-4E11 |
| 125 | AA | L6-4E12 |
| 126 | AA | L6-4F01 |
| 127 | AA | L6-4F10 |
| 128 | AA | L6-4F12 |
| 129 | AA | L6-4G02 |
| 130 | AA | L6-4G03 |
| 131 | AA | L6-4G06 |
| 132 | AA | L6-4G07 |
| 133 | AA | L6-4G08 |
| 134 | AA | L6-4G10 |
| 135 | AA | L6-4H07 |
| 136 | AA | L6-5A02 |
| 137 | AA | L6-5A03 |
| 138 | AA | L6-5A04 |
| 139 | AA | L6-5A05 |
| 140 | AA | L6-5A06 |
| 141 | AA | L6-5A07 |
| 142 | AA | L6-5A09 |
| 143 | AA | L6-5A10 |
| 144 | AA | L6-5B02 |
| 145 | AA | L6-5B07 |
| 146 | AA | L6-5B08 |
| 147 | AA | L6-5B11 |
| 148 | AA | L6-5C01 |
| 149 | AA | L6-5C02 |
| 150 | AA | L6-5C04 |
| 151 | AA | L6-5C08 |
| 152 | AA | L6-5C10 |
| 153 | AA | L6-5C11 |
| 154 | AA | L6-5D04 |
| 155 | AA | L6-5D09 |
| 156 | AA | L6-5D11 |
| 157 | AA | L6-5D12 |
| 158 | AA | L6-5E05 |
| 159 | AA | L6-5E09 |
| 160 | AA | L6-5F02 |
| 161 | AA | L6-5F04 |
| 162 | AA | L6-5F05 |
| 163 | AA | L6-5F07 |
| 164 | AA | L6-5F08 |
| 165 | AA | L6-5F10 |
| 166 | AA | L6-5F12 |
| 167 | AA | L6-5G03 |
| 168 | AA | L6-5G05 |
| 169 | AA | L6-5G06 |
| 170 | AA | L6-5G08 |
| 171 | AA | L6-5G11 |
| 172 | AA | L6-5G12 |
| 173 | AA | L6-5H03 |
| 174 | AA | L6-5H06 |
| 175 | AA | L6-5H07 |
| 176 | AA | L6-5H12 |
| 177 | AA | L6-6A09 |
| 178 | AA | L6-6B01 |
| 179 | AA | L6-6B03 |
| 180 | AA | L6-6B04 |
| 181 | AA | L6-6B05 |
| 182 | AA | L6-6B10 |
| 183 | AA | L6-6C01 |
| 184 | AA | L6-6C02 |
| 185 | AA | L6-6C04 |
| 186 | AA | L6-6C05 |
| 187 | AA | L6-6C06 |
| 188 | AA | L6-6C07 |
| 189 | AA | L6-6C10 |
| 190 | AA | L6-6C11 |
| 191 | AA | L6-6D02 |
| 192 | AA | L6-6D06 |
| 193 | AA | L6-6D07 |
| 194 | AA | L6-6D09 |
| 195 | AA | L6-6D10 |
| 196 | AA | L6-6D12 |
| 197 | AA | L6-6E01 |
| 198 | AA | L6-6E02 |
| 199 | AA | L6-6E03 |
| 200 | AA | L6-6E11 |
| 201 | AA | L6-6F03 |
| 202 | AA | L6-6F07 |
| 203 | AA | L6-6F08 |
| 204 | AA | L6-6G01 |
| 205 | AA | L7-1A01 |
| 206 | AA | L7-1B01 |
| 207 | AA | L7-1C01 |
| 208 | AA | L7-1D01 |
| 209 | AA | L7-1E01 |
| 210 | AA | L7-1F01 |
| 211 | AA | L7-1G01 |
| 212 | AA | L7-1C02 |
| 213 | AA | L7-1D02 |
| 214 | AA | L7-1E02 |
| 215 | AA | L7-1F02 |
| 216 | AA | L7-1G02 |
| 217 | AA | L7-1H02 |
| 218 | AA | L7-1C03 |
| 219 | AA | L7-1E03 |
| 220 | AA | L7-1A04 |
| 221 | AA | L7-1C04 |
| 222 | AA | L7-1D04 |
| 223 | AA | L7-1E04 |
| 224 | AA | L7-1F04 |
| 225 | AA | L7-1G04 |
| 226 | AA | L7-1H04 |
| 227 | AA | L7-1A05 |
| 228 | AA | L7-1C05 |
| 229 | AA | L7-1E05 |
| 230 | AA | L7-1F05 |
| 231 | AA | L7-1A06 |
| 232 | AA | L7-1B06 |
| 233 | AA | L7-1D06 |
| 234 | AA | L7-1E06 |
| 235 | AA | L7-1F06 |
| 236 | AA | L7-1G06 |
| 237 | AA | L7-1H06 |
| 238 | AA | L7-1A07 |
| 239 | AA | L7-1B07 |
| 240 | AA | L7-1C07 |
| 241 | AA | L7-1D07 |
| 242 | AA | L7-1E07 |
| 243 | AA | L7-1F07 |
| 244 | AA | L7-1G07 |
| 245 | AA | L7-1A08 |
| 246 | AA | L7-1C08 |
| 247 | AA | L7-1D08 |
| 248 | AA | L7-1E08 |
| 249 | AA | L7-1F08 |
| 250 | AA | L7-1G08 |
| 251 | AA | L7-1A09 |
| 252 | AA | L7-1B09 |
| 253 | AA | L7-1C09 |
| 254 | AA | L7-1D09 |
| 255 | AA | L7-1E09 |
| 256 | AA | L7-1G09 |
| 257 | AA | L7-1A10 |
| 258 | AA | L7-1B10 |
| 259 | AA | L7-1C10 |
| 260 | AA | L7-1D10 |
| 261 | AA | L7-1F10 |
| 262 | AA | L7-1A11 |
| 263 | AA | L7-1B11 |
| 264 | AA | L7-1C11 |
| 265 | AA | L7-1E11 |
| 266 | AA | L7-1A12 |
| 267 | AA | L7-1C12 |
| 268 | AA | L7-1F12 |
| 269 | AA | L7-1G12 |
| 270 | AA | L7-2A01 |
| 271 | AA | L7-2B01 |
| 272 | AA | L7-2D01 |
| 273 | AA | L7-2E01 |
| 274 | AA | L7-2F01 |
| 275 | AA | L7-2G01 |
| 276 | AA | L7-2H01 |
| 277 | AA | L7-2B02 |
| 278 | AA | L7-2D02 |
| 279 | AA | L7-2E02 |
| 280 | AA | L7-2F02 |
| 281 | AA | L7-2G02 |
| 282 | AA | L7-2H02 |
| 283 | AA | L7-2D03 |
| 284 | AA | L7-2E03 |
| 285 | AA | L7-2F03 |
| 286 | AA | L7-2G03 |
| 287 | AA | L7-2H03 |
| 288 | AA | L7-2D04 |
| 289 | AA | L7-2E04 |
| 290 | AA | L7-2F04 |
| 291 | AA | L7-2H04 |
| 292 | AA | L7-2B05 |
| 293 | AA | L7-2D05 |
| 294 | AA | L7-2E05 |
| 295 | AA | L7-2F05 |
| 296 | AA | L7-2H05 |
| 297 | AA | L7-2A06 |
| 298 | AA | L7-2C06 |
| 299 | AA | L7-2D06 |
| 300 | AA | L7-2F06 |
| 301 | AA | L7-2G06 |
| 302 | AA | L7-2A07 |
| 303 | AA | L7-2B07 |
| 304 | AA | L7-2C07 |
| 305 | AA | L7-2D07 |
| 306 | AA | L7-2E07 |
| 307 | AA | L7-2G07 |
| 308 | AA | L7-2B08 |
| 309 | AA | L7-2D08 |
| 310 | AA | L7-2F08 |
| 311 | AA | L7-2G08 |
| 312 | AA | L7-2B09 |
| 313 | AA | L7-2C09 |
| 314 | AA | L7-2E09 |
| 315 | AA | L7-2B10 |
| 316 | AA | L7-2E10 |
| 317 | AA | L7-2G10 |
| 318 | AA | L7-2C11 |
| 319 | AA | L7-2D11 |
| 320 | AA | L7-2F11 |
| 321 | AA | L7-2G11 |
| 322 | AA | L7-2B12 |
| 323 | AA | L7-2C12 |
| 324 | AA | L7-2D12 |
| 325 | AA | L7-2F12 |
| 326 | AA | L7-2G12 |
| 327 | AA | L7-3A01 |
| 328 | AA | L7-3C01 |
| 329 | AA | L7-3G01 |
| 330 | AA | L7-3H01 |
| 331 | AA | L7-3A02 |
| 332 | AA | L7-3B02 |
| 333 | AA | L7-3D02 |
| 334 | AA | L7-3G02 |
| 335 | AA | L7-3H02 |
| 336 | AA | L7-3B03 |
| 337 | AA | L7-3C03 |
| 338 | AA | L7-3E03 |
| 339 | AA | L7-3G03 |
| 340 | AA | L7-3H03 |
| 341 | AA | L7-3B04 |
| 342 | AA | L7-3E04 |
| 343 | AA | L7-3G04 |
| 344 | AA | L7-3A05 |
| 345 | AA | L7-3B05 |
| 346 | AA | L7-3H05 |
| 347 | AA | L7-3B06 |
| 348 | AA | L7-3D06 |
| 349 | AA | L7-3E06 |
| 350 | AA | L7-3A07 |
| 351 | AA | L7-3C07 |
| 352 | AA | L7-3F07 |
| 353 | AA | L7-3A08 |
| 354 | AA | L7-3B08 |
| 355 | AA | L7-3C08 |
| 356 | AA | L7-3F08 |
| 357 | AA | L7-3G08 |
| 358 | AA | L7-3B09 |
| 359 | AA | L7-3F09 |
| 360 | AA | L7-3A10 |
| 361 | AA | L7-3B10 |
| 362 | AA | L7-3C10 |
| 363 | AA | L7-3G10 |
| 364 | AA | L7-3A11 |
| 365 | AA | L7-3C11 |
| 366 | AA | L7-3E11 |
| 367 | AA | L7-3G11 |
| 368 | AA | L7-3A12 |
| 369 | AA | L7-3B12 |
| 370 | AA | L7-3C12 |
| 371 | AA | L7-3E12 |
| 372 | AA | L7-3F12 |
| 373 | AA | L7-3G12 |
| 374 | AA | L7-4A01 |
| 375 | AA | L7-4A03 |
| 376 | AA | L7-4A04 |
| 377 | AA | L7-4A06 |
| 378 | AA | L7-4A08 |
| 379 | AA | L7-4A09 |
| 380 | AA | L7-4A12 |
| 381 | AA | L7-4B03 |
| 382 | AA | L7-4B04 |
| 383 | AA | L7-4B06 |
| 384 | AA | L7-4B07 |
| 385 | AA | L7-4C01 |
| 386 | AA | L7-4C03 |
| 387 | AA | L7-4C04 |
| 388 | AA | L7-4C06 |
| 389 | AA | L7-4C09 |
| 390 | AA | L7-4C12 |
| 391 | AA | L7-4D04 |
| 392 | AA | L7-4D07 |
| 393 | AA | L7-4D08 |
| 394 | AA | L7-4D10 |
| 395 | AA | L7-4D11 |
| 396 | AA | L7-4E01 |
| 397 | AA | L7-4E02 |
| 398 | AA | L7-4E04 |
| 399 | AA | L7-4E05 |
| 400 | AA | L7-4E07 |
| 401 | AA | L7-4E08 |
| 402 | AA | L6-3A09 |
| 403 | AA | L7-4C06 |
| 404 | AA | L10-84 |
| 405 | AA | L13-2-46 |
| 406 | AA | L12-1-10 |
| 407 | AA | L13-2-23 |
| 408 | AA | L7-1C3-A5 |
| 409 | AA | L7-1F8-A11 |
| 410 | AA | L7-1G6-B2 |
| 411 | AA | L7-3E3-D1 |
| 412 | AA | L1-18 |
| 413 | AA | L1-21 |
| 414 | AA | L1-25 |
| 415 | AA | L1-33 |
| 416 | AA | L1-34 |
| 417 | AA | L1-36 |
| 418 | AA | L1-39 |
| 419 | AA | L1-41 |
| 420 | DNA | L1-02 CDS |
| 421 | DNA | L1-07 CDS |
| 422 | DNA | L1-09 CDS |
| 423 | DNA | L1-20 CDS |
| 424 | DNA | L1-22 CDS |
| 425 | DNA | L1-24 CDS |
| 426 | DNA | L1-28 CDS |
| 427 | DNA | L1-29 CDS |
| 428 | DNA | L1-31 CDS |
| 429 | DNA | L1-38 CDS |
| 430 | DNA | L1-44 CDS |
| 431 | DNA | L6-1B03 CDS |
| 432 | DNA | L6-1C03 CDS |
| 433 | DNA | L6-1C06 CDS |
| 434 | DNA | L6-1G06 CDS |
| 435 | DNA | L6-1G07 CDS |
| 436 | DNA | L6-1G09 CDS |
| 437 | DNA | L6-1G10 CDS |
| 438 | DNA | L6-1G11 CDS |
| 439 | DNA | L6-1H12 CDS |
| 440 | DNA | L6-2A01 CDS |
| 441 | DNA | L6-2A02 CDS |
| 442 | DNA | L6-2A04 CDS |
| 443 | DNA | L6-2A06 CDS |
| 444 | DNA | L6-2A12 CDS |
| 445 | DNA | L6-2B04 CDS |
| 446 | DNA | L6-2B06 CDS |
| 447 | DNA | L6-2B08 CDS |
| 448 | DNA | L6-2B09 CDS |
| 449 | DNA | L6-2B10 CDS |
| 450 | DNA | L6-2B11 CDS |
| 451 | DNA | L6-2C02 CDS |
| 452 | DNA | L6-2C05 CDS |
| 453 | DNA | L6-2C09 CDS |
| 454 | DNA | L6-2C10 CDS |
| 455 | DNA | L6-2C11 CDS |
| 456 | DNA | L6-2D01 CDS |
| 457 | DNA | L6-2D02 CDS |
| 458 | DNA | L6-2D03 CDS |
| 459 | DNA | L6-2D04 CDS |
| 460 | DNA | L6-2D07 CDS |
| 461 | DNA | L6-2D11 CDS |
| 462 | DNA | L6-2D12 CDS |
| 463 | DNA | L6-2E02 CDS |
| 464 | DNA | L62E03 CDS |
| 465 | DNA | L6-2E04 CDs |
| 466 | DNA | L6-2E05 CDS |
| 467 | DNA | L6-2E07 CDS |
| 468 | DNA | L6-2E08 CDS |
| 469 | DNA | L6-2E09 CDS |
| 470 | DNA | L6-2E11 CDS |
| 471 | DNA | L6-2F08 CDS |
| 472 | DNA | L6-2F10 CDS |
| 473 | DNA | L6-2F11 CDS |
| 474 | DNA | L6-2F12 CDS |
| 475 | DNA | L6-2G01 CDS |
| 476 | DNA | L6-2G02 CDS |
| 477 | DNA | L6-2G03 CDS |
| 478 | DNA | L6-2G05 CDS |
| 479 | DNA | L6-2G10 CDS |
| 480 | DNA | L6-2H01 CDS |
| 481 | DNA | L6-2H02 CDS |
| 482 | DNA | L6-2H03 CDS |
| 483 | DNA | L6-2H04 CDS |
| 484 | DNA | L6-2H06 CDS |
| 485 | DNA | L6-2H07 CDS |
| 486 | DNA | L6-2H10 CDS |
| 487 | DNA | L6-2H11 CDS |
| 488 | DNA | L6-3A01 CDS |
| 489 | DNA | L6-3A02 CDS |
| 490 | DNA | L6-3A03 CDS |
| 491 | DNA | L6-3A06 CDS |
| 492 | DNA | L6-3A11 CDS |
| 493 | DNA | L6-3B08 CDS |
| 494 | DNA | L6-3B09 CDS |
| 495 | DNA | L6-3C02 CDS |
| 496 | DNA | L6-3C04 CDS |
| 497 | DNA | L6-3C05 CDS |
| 498 | DNA | L6-3C06 CDS |
| 499 | DNA | L6-3D03 CDS |
| 500 | DNA | L6-3D05 CDS |
| 501 | DNA | L6-3D09 CDS |
| 502 | DNA | L6-3E08 CDS |
| 503 | DNA | L6-3E09 CDS |
| 504 | DNA | L6-3E10 CDS |
| 505 | DNA | L6-3F02 CDS |
| 506 | DNA | L6-3F09 CDS |
| 507 | DNA | L6-3F12 CDS |
| 508 | DNA | L6-3G03 CDS |
| 509 | DNA | L6-3G05 CDS |
| 510 | DNA | L6-3G09 CDS |
| 511 | DNA | L6-3H02 CDS |
| 512 | DNA | L6-3H05 CDS |
| 513 | DNA | L6-3H08 CDS |
| 514 | DNA | L6-4A01 CDS |
| 515 | DNA | L6-4A03 CDS |
| 516 | DNA | L6-4A04 CDS |
| 517 | DNA | L6-4A09 CDS |
| 518 | DNA | L6-4A10 CDS |
| 519 | DNA | L6-4A11 CDS |
| 520 | DNA | L6-4B05 CDS |
| 521 | DNA | L6-4B06 CDS |
| 522 | DNA | L6-4B07 CDS |
| 523 | DNA | L6-4B08 CDS |
| 524 | DNA | L6-4B12 CDS |
| 525 | DNA | L6-4C01 CDS |
| 526 | DNA | L6-4C03 CDS |
| 527 | DNA | L6-4C04 CDS |
| 528 | DNA | L6-4C07 CDS |
| 529 | DNA | L6-4C08 CDS |
| 530 | DNA | L6-4C09 CDS |
| 531 | DNA | L6-4C10 CDS |
| 532 | DNA | L6-4C11 CDS |
| 533 | DNA | L6-4D09 CDS |
| 534 | DNA | L6-4D10 CDS |
| 535 | DNA | L6-4E01 CDS |
| 536 | DNA | L6-4E02 CDS |
| 537 | DNA | L6-4E03 CDS |
| 538 | DNA | L6-4E05 CDS |
| 539 | DNA | L6-4E08 CDS |
| 540 | DNA | L6-4E09 CDS |
| 541 | DNA | L6-4E11 CDS |
| 542 | DNA | L6-4E12 CDS |
| 543 | DNA | L6-4F01 CDS |
| 544 | DNA | L6-4F10 CDS |
| 545 | DNA | L6-4F12 CDS |
| 546 | DNA | L6-4G02 CDS |
| 547 | DNA | L6-4G03 CDS |
| 548 | DNA | L6-4G06 CDS |
| 549 | DNA | L6-4G07 CDS |
| 550 | DNA | L6-4G08 CDS |
| 551 | DNA | L6-4G10 CDS |
| 552 | DNA | L6-4H07 CDS |
| 553 | DNA | L6-5A02 CDS |
| 554 | DNA | L6-5A03 CDS |
| 555 | DNA | L6-5A04 CDS |
| 556 | DNA | L6-5A05 CDS |
| 557 | DNA | L6-5A06 CDS |
| 558 | DNA | L6-5A07 CDS |
| 559 | DNA | L6-5A09 CDS |
| 560 | DNA | L6-5A10 CDS |
| 561 | DNA | L6-5B02 CDS |
| 562 | DNA | L6-5B07 CDS |
| 563 | DNA | L6-5B08 CDS |
| 564 | DNA | L6-5B11 CDS |
| 565 | DNA | L6-5C01 CDS |
| 566 | DNA | L6-5C02 CDS |
| 567 | DNA | L6-5C04 CDS |
| 568 | DNA | L6-5C08 CDS |
| 569 | DNA | L6-5C10 CDS |
| 570 | DNA | L6-5C11 CDS |
| 571 | DNA | L6-5D04 CDS |
| 572 | DNA | L6-5D09 CDS |
| 573 | DNA | L6-5D11 CDS |
| 574 | DNA | L6-5D12 CDS |
| 575 | DNA | L6-5E05 CDS |
| 576 | DNA | L6-5E09 CDS |
| 577 | DNA | L6-5F02 CDS |
| 578 | DNA | L6-5F04 CDS |
| 579 | DNA | L6-5F05 CDS |
| 580 | DNA | L6-5F07 CDS |
| 581 | DNA | L6-5F08 CDS |
| 582 | DNA | L6-5F10 CDS |
| 583 | DNA | L6-5F12 CDS |
| 584 | DNA | L6-5G03 CDS |
| 585 | DNA | L6-5G05 CDS |
| 586 | DNA | L6-5G06 CDS |
| 587 | DNA | L0-5G08 CDS |
| 588 | DNA | L6-5G11 CDS |
| 589 | DNA | L6-5G12 CDS |
| 590 | DNA | L6-5H03 CDS |
| 591 | DNA | L6-5H06 CDS |
| 592 | DNA | L6-5H07 CDS |
| 593 | DNA | L6-5H12 CDS |
| 594 | DNA | L6-6A09 CDS |
| 595 | DNA | L6-6B01 CDS |
| 596 | DNA | L6-6B03 CDS |
| 597 | DNA | L6-6B04 CDS |
| 598 | DNA | L6-6B05 CDS |
| 599 | DNA | L6-6B10 CDS |
| 600 | DNA | L6-6C01 CDS |
| 601 | DNA | L6-6C02 CDS |
| 602 | DNA | L6-6C04 CDS |
| 603 | DNA | L6-6C05 CDS |
| 604 | DNA | L6-6C06 CDS |
| 605 | DNA | L6-6C07 CDS |
| 606 | DNA | L6-6C10 CDS |
| 607 | DNA | L6-6C11 CDS |
| 608 | DNA | L6-6D02 CDS |
| 609 | DNA | L6-6D06 CDS |
| 610 | DNA | L6-6D07 CDS |
| 611 | DNA | L6-6D09 CDS |
| 612 | DNA | L6-6D10 CDS |
| 613 | DNA | L6-6D12 CDS |
| 614 | DNA | L6-6E01 CDS |
| 615 | DNA | L6-6E02 CDS |
| 616 | DNA | L6-6E03 CDS |
| 617 | DNA | L6-6E11CDS |
| 618 | DNA | L6-6F03 CDS |
| 619 | DNA | L6-6F07 CDS |
| 620 | DNA | L6-6F08 CDS |
| 621 | DNA | L6-6G01 CDS |
| 622 | DNA | L7-1A01 CDS |
| 623 | DNA | L7-1B01 Cds |
| 624 | DNA | L7-1C01 CDS |
| 625 | DNA | L7-1D01 CDS |
| 626 | DNA | L7-1E01 CDS |
| 627 | DNA | L7-1F01 CDS |
| 628 | DNA | L7-1G01 CDS |
| 629 | DNA | L7-1C02 CDS |
| 630 | DNA | L7-1D02 CDS |
| 631 | DNA | L7-1E02 CDS |
| 632 | DNA | L7-1F02 CDS |
| 633 | DNA | L7-1G02 CDS |
| 634 | DNA | L7-1H02 CDS |
| 635 | DNA | L7-1C03 CDS |
| 636 | DNA | L7-1E03 CDS |
| 637 | DNA | L7-1A04 CDS |
| 638 | DNA | L7-1C04 CDS |
| 639 | DNA | L7-1D04 CDS |
| 640 | DNA | L7-1E04 CDS |
| 641 | DNA | L7-1F04 CDS |
| 642 | DNA | L7-1G04 CDS |
| 643 | DNA | L7-1H04 CDS |
| 644 | DNA | L7-1A05 CDS |
| 645 | DNA | L7-1C05 CDS |
| 646 | DNA | L7-1E05 CDS |
| 647 | DNA | L7-1F05 CDS |
| 648 | DNA | L7-1A06 CDS |
| 649 | DNA | L7-1B06 CDS |
| 650 | DNA | L7-1D06 CDS |
| 651 | DNA | L7-1E06 CDS |
| 652 | DNA | L7-1F06 CDS |
| 653 | DNA | L7-1G06 CDS |
| 654 | DNA | L7-1H06 CDS |
| 655 | DNA | L7-1A07 CDS |
| 656 | DNA | L7-1B07 CDS |
| 657 | DNA | L7-1C07 CDS |
| 658 | DNA | L7-1D07 CDS |
| 659 | DNA | L7-1E07 CDS |
| 660 | DNA | L7-1F07 CDS |
| 661 | DNA | L7-1G07 CDS |
| 662 | DNA | L7-1A08 CDS |
| 663 | DNA | L7-1C08 CDS |
| 664 | DNA | L7-1D08 CDS |
| 665 | DNA | L7-1E08 CDS |
| 666 | DNA | L7-1F08 CDS |
| 667 | DNA | L7-1G08 CDS |
| 668 | DNA | L7-1A09 CDS |
| 669 | DNA | L7-1B09 CDS |
| 670 | DNA | L7-1C09 CDS |
| 671 | DNA | L7-1D09 CDS |
| 672 | DNA | L7-1E09 CDS |
| 673 | DNA | L7-1G09 CDS |
| 674 | DNA | L7-1A10 CDS |
| 675 | DNA | L7-1B10 CDS |
| 676 | DNA | L7-1C10 CDS |
| 677 | DNA | L7-1D10 CDS |
| 678 | DNA | L7-1F10 CDS |
| 679 | DNA | L7-1A11 CDS |
| 680 | DNA | L7-1B11 CDS |
| 681 | DNA | L7-1C11 CDS |
| 682 | DNA | L7-1E11 CDS |
| 683 | DNA | L7-1A12 CDS |
| 684 | DNA | L7-1C12 CDS |
| 685 | DNA | L7-1F12 CDS |
| 686 | DNA | L7-1G12 CDS |
| 687 | DNA | L7-2A01 CDS |
| 688 | DNA | L7-2B01 CDS |
| 689 | DNA | L7-2D01 CDS |
| 690 | DNA | L7-2E01 CDS |
| 691 | DNA | L7-2F01 CDS |
| 692 | DNA | L7-2G01 CDS |
| 693 | DNA | L7-2H01 CDS |
| 694 | DNA | L7-2B02 CDS |
| 695 | DNA | L7-2D02 CDS |
| 696 | DNA | L7-2E02 CDS |
| 697 | DNA | L7-2F02 CDS |
| 698 | DNA | L7-2G02 CDS |
| 699 | DNA | L7-2H02 CDS |
| 700 | DNA | L7-2D03 CDS |
| 701 | DNA | L7-2E03 CDS |
| 702 | DNA | L7-2F03 CDS |
| 703 | DNA | L7-2G03 CDS |
| 704 | DNA | L7-2H03 CDS |
| 705 | DNA | L7-2D04 CDS |
| 706 | DNA | L7-2E04 CDS |
| 707 | DNA | L7-2F04 CDS |
| 708 | DNA | L7-2H04 CDS |
| 709 | DNA | L7-2B05 CDS |
| 710 | DNA | L7-2D05 CDS |
| 711 | DNA | L7-2E05 CDS |
| 712 | DNA | L7-2F05 CDS |
| 713 | DNA | L7-2H05 CDS |
| 714 | DNA | L7-2A06 CDS |
| 715 | DNA | L7-2C06 CDS |
| 716 | DNA | L7-2D06 CDS |
| 717 | DNA | L7-2F06 CDS |
| 718 | DNA | L7-2G06 CDS |
| 719 | DNA | L7-2A07 CDS |
| 720 | DNA | L7-2B07 CDS |
| 721 | DNA | L7-2C07 CDS |
| 722 | DNA | L7-2D07 CDS |
| 723 | DNA | L7-2E07 CDS |
| 724 | DNA | L7-2G07 CDS |
| 725 | DNA | L7-2B08 CDS |
| 726 | DNA | L7-2D08 CDS |
| 727 | DNA | L7-2F08 CDS |
| 728 | DNA | L7-2G08 CDS |
| 729 | DNA | L7-2B09 CDS |
| 730 | DNA | L7-2C09 CDS |
| 731 | DNA | L7-2E09 CDS |
| 732 | DNA | L7-2B10 CDS |
| 733 | DNA | L7-2E10 CDS |
| 734 | DNA | L7-2G10 CDS |
| 735 | DNA | L7-2C11 CDS |
| 736 | DNA | L7-2D11 CDS |
| 737 | DNA | L7-2F11 CDS |
| 738 | DNA | L7-2G11 CDS |
| 739 | DNA | L7-2B12 CDS |
| 740 | DNA | L7-2C12 CDS |
| 741 | DNA | L7-2D12 CDS |
| 742 | DNA | L7-2F12 CDS |
| 743 | DNA | L7-2G12 CDS |
| 744 | DNA | L7-3A01 CDS |
| 745 | DNA | L7-3C01 CDS |
| 746 | DNA | L7-3G01 CDS |
| 747 | DNA | L7-3H01 CDS |
| 748 | DNA | L7-3A02 CDS |
| 749 | DNA | L7-3B02 CDS |
| 750 | DNA | L7-3D02 CDS |
| 751 | DNA | L7-3G02 CDS |
| 752 | DNA | L7-3H02 CDS |
| 753 | DNA | L7-3B03 CDS |
| 754 | DNA | L7-3C03 CDS |
| 755 | DNA | L7-3E03 CDS |
| 756 | DNA | L7-3G03 CDS |
| 757 | DNA | L7-3H03 CDS |
| 758 | DNA | L7-3B04 CDS |
| 759 | DNA | L7-3E04 CDS |
| 760 | DNA | L7-3G04 CDS |
| 761 | DNA | L7-3A05 CDS |
| 762 | DNA | L7-3B05 CDS |
| 763 | DNA | L7-3H05 CDS |
| 764 | DNA | L7-3B06 CDS |
| 765 | DNA | L7-3D06 CDS |
| 766 | DNA | L7-3E06 CDS |
| 767 | DNA | L7-3A07 CDS |
| 768 | DNA | L7-3C07 CDS |
| 769 | DNA | L7-3F07 CDS |
| 770 | DNA | L7-3A08 CDS |
| 771 | DNA | L7-3B08 CDS |
| 772 | DNA | L7-3C08 CDS |
| 773 | DNA | L7-3F08 CDS |
| 774 | DNA | L7-3G08 CDS |
| 775 | DNA | L7-3B09 CDS |
| 776 | DNA | L7-3F09 CDS |
| 777 | DNA | L7-3A10 CDS |
| 778 | DNA | L7-3B10 CDS |
| 779 | DNA | L7-3C10 CDS |
| 780 | DNA | L7-3G10 CDS |
| 781 | DNA | L7-3A11 CDS |
| 782 | DNA | L7-3C11 CDS |
| 783 | DNA | L7-3E11 CDS |
| 784 | DNA | L7-3G11 CDS |
| 785 | DNA | L7-3Al2 CDS |
| 786 | DNA | L7-3B12 CDS |
| 787 | DNA | L7-3C12 CDS |
| 788 | DNA | L7-3E12 CDS |
| 789 | DNA | L7-3F12 CDS |
| 790 | DNA | L7-3G12 CDS |
| 791 | DNA | L7-4A01 CDS |
| 792 | DNA | L7-4A03 CDS |
| 793 | DNA | L7-4A04 CDS |
| 794 | DNA | L7-4A06 CDS |
| 795 | DNA | L7-4A08 CDS |
| 796 | DNA | L7-4A09 CDS |
| 797 | DNA | L7-4A12 CDS |
| 798 | DNA | L7-4B03 CDS |
| 799 | DNA | L7-4B04 CDS |
| 800 | DNA | L7-4B06 CDS |
| 801 | DNA | L7-4B07 CDS |
| 802 | DNA | L7-4C01 CDS |
| 803 | DNA | L7-4C03 CDS |
| 804 | DNA | L7-4C04 CDS |
| 805 | DNA | L7-4C06 CDS |
| 806 | DNA | L7-4C09 CDS |
| 807 | DNA | L7-4C12 CDS |
| 808 | DNA | L7-4D04 CDS |
| 809 | DNA | L7-4D07 CDS |
| 810 | DNA | L7-4D08 CDS |
| 811 | DNA | L7-4D10 CDS |
| 812 | DNA | L7-4D11 CDS |
| 813 | DNA | L7-4E01 CDS |
| 814 | DNA | L7-4E02 CDS |
| 815 | DNA | L7-4E04 CDS |
| 816 | DNA | L7-4E05 CDS |
| 817 | DNA | L7-4E07 CDS |
| 818 | DNA | L7-4E08 CDS |
| 819 | DNA | L6-3A09 CDS |
| 820 | DNA | L7-4C06 (E03) |
| | | CDS |
| 821 | DNA | L10-84(B12) |
| | | CDS |
| 822 | DNA | L13-2-46(D10) |
| | | CDS |
| 823 | DNA | L12-1-10 CDS |
| 824 | DNA | L13-2-23 CDS |
| 825 | DNA | L7-1C3-A5 |
| 826 | DNA | L7-1F8-A11 |
| 827 | DNA | L7-1G6-B2 |
| 828 | DNA | L7-3E3-D1 |
| 829 | DNA | L1-18 CDS |
| 830 | DNA | L1-21 CDS |
| 831 | DNA | L1-25 CDS |
| 832 | DNA | L1-33 CDS |
| 833 | DNA | L1-34 CDS |
| 834 | DNA | L1-36 CDS |
| 835 | DNA | L1-39 CDS |
| 836 | DNA | L1-41 CDS |
| 841 | DNA | Plasmid |
| | | PHP37586A |
| 842 | DNA | Plasmid |
| | | PHP37587A |
| 843 | DNA | Plasmid |
| | | PHP37588A |
| 844 | DNA | Plasmid |
| | | PHP37589A |
| 845 | DNA | Plasmid |
| | | PHP39389A |
| 846 | DNA | Plasmid |
| | | PHP39390A |
| 847 | DNA | Construct |
| | | containing |
| | | artificial |
| | | microRNA |
| 848 | DNA | Tet operator |
| | | sequence |
| 863 | AA | L13-23 |
| 864 | AA | L15-20 |
| 865 | AA | L15-20-M4 |
| 866 | AA | L15-20-M9 |
| 867 | AA | L15-20-M34 |
| 868 | AA | CsL4.2-20 |
| | | having the L17G |
| | | mutation |
| 869 | AA | CsL4.2-15 |
| 870 | AA | CsL4.2-20 |
| 884 | AA | L13-23 having |
| | | the L 17G |
| | | mutation |
| 885 | AA | L15-20 having |
| | | the L 17G |
| | | mutation |
| 886 | AA | L15-20-M4 |
| | | having the L17G |
| | | mutation |
| 887 | AA | L15-20-M9 |
| | | having the L17G |
| | | mutation |
| 888 | AA | L15-20-M34 |
| | | having the L17G |
| | | mutation |
| 889 | AA | CsL4.2-15 |
| | | having the L17G |
| | | mutation |
| 1193 | DNA | L10-11(A04) |
| 1194 | DNA | L10-13(A05) |
| 1195 | DNA | L10-15(A06) |
| 1196 | DNA | L10-30(A09) |
| 1197 | DNA | L10-35(A11) |
| 1198 | DNA | L10-46(B02) |
| 1199 | DNA | L10-47(B03) |
| 1200 | DNA | L10-54(B06) |
| 1201 | DNA | L10-55(B07) |
| 1202 | DNA | L10-59(B08) |
| 1203 | DNA | L10-72(B10) |
| 1204 | DNA | L10-84(B12) |
| 1205 | DNA | L10-90(C02) |
| 1206 | DNA | L11-17(C06) |
| 1207 | DNA | L11-53(C09) |
| 1208 | DNA | L12-1-03 |
| 1209 | DNA | L12-1-06 |
| 1210 | DNA | L12-1-09 |
| 1211 | DNA | L12-1-10 |
| 1212 | DNA | L12-1-11 |
| 1213 | DNA | L12-1-12 |
| 1214 | DNA | L12-1-16 |
| 1215 | DNA | L12-1-17 |
| 1216 | DNA | L12-1-19 |
| 1217 | DNA | L12-1-20 |
| 1218 | DNA | L12-1-21 |
| 1219 | DNA | L12-1-22 |
| 1220 | DNA | L12-2-13 |
| 1221 | DNA | L12-2-14 |
| 1222 | DNA | L12-2-15 |
| 1223 | DNA | L12-2-20 |
| 1224 | DNA | L12-2-22 |
| 1225 | DNA | L12-2-23 |
| 1226 | DNA | L12-2-27 |
| 1227 | DNA | L12-2-33 |
| 1228 | DNA | L12-2-39 |
| 1229 | DNA | L12-2-48 |
| 1230 | DNA | L12-2-49 |
| 1231 | DNA | L12-2-50 |
| 1232 | DNA | L13-1-01 |
| 1233 | DNA | L13-1-02 |
| 1234 | DNA | L13-1-03 |
| 1235 | DNA | L13-1-04 |
| 1236 | DNA | L13-1-05 |
| 1237 | DNA | L13-1-06 |
| 1238 | DNA | L13-1-07 |
| 1239 | DNA | L13-1-08 |
| 1240 | DNA | L13-1-09 |
| 1241 | DNA | L13-1-10 |
| 1242 | DNA | L13-1-11 |
| 1243 | DNA | L13-1-12 |
| 1244 | DNA | L13-1-13 |
| 1245 | DNA | L13-1-14 |
| 1246 | DNA | L13-1-15 |
| 1247 | DNA | L13-1-16 |
| 1248 | DNA | L13-1-17 |
| 1249 | DNA | L13-1-18 |
| 1250 | DNA | L13-1-19 |
| 1251 | DNA | L13-1-20 |
| 1252 | DNA | L13-1-21 |
| 1253 | DNA | L13-1-22 |
| 1254 | DNA | L13-1-23 |
| 1255 | DNA | L13-1-24 |
| 1256 | DNA | L13-1-25 |
| 1257 | DNA | L13-1-26 |
| 1258 | DNA | L13-1-27 |
| 1259 | DNA | L13-1-28 |
| 1260 | DNA | L13-1-29 |
| 1261 | DNA | L13-1-30 |
| 1262 | DNA | L13-1-31 |
| 1263 | DNA | L13-1-32 |
| 1264 | DNA | L13-1-33 |
| 1265 | DNA | L13-1-34 |
| 1266 | DNA | L13-1-35 |
| 1267 | DNA | L13-1-36 |
| 1268 | DNA | L13-1-37 |
| 1269 | DNA | L13-1-38 |
| 1270 | DNA | L13-1-39 |
| 1271 | DNA | L13-1-40 |
| 1272 | DNA | L13-1-41 |
| 1273 | DNA | L13-1-42 |
| 1274 | DNA | L13-1-43 |
| 1275 | DNA | L13-1-44 |
| 1276 | DNA | L13-1-45 |
| 1277 | DNA | L13-1-47 |
| 1278 | DNA | L13-1-48 |
| 1279 | DNA | L13-2-13 |
| 1280 | DNA | L13-2-14 |
| 1281 | DNA | L13-2-15 |
| 1282 | DNA | L13-2-16 |
| 1283 | DNA | L13-2-17 |
| 1284 | DNA | L13-2-18 |
| 1285 | DNA | L13-2-19 |
| 1286 | DNA | L13-2-20 |
| 1287 | DNA | L13-2-21 |
| 1288 | DNA | L13-2-22 |
| 1289 | DNA | L13-2-23 |
| 1290 | DNA | L13-2-24 |
| 1291 | DNA | L13-2-27 |
| 1292 | DNA | L13-2-28 |
| 1293 | DNA | L13-2-29 |
| 1294 | DNA | L13-2-30 |
| 1295 | DNA | L13-2-31 |
| 1296 | DNA | L13-2-32 |
| 1297 | DNA | L13-2-33 |
| 1298 | DNA | L13-2-34 |
| 1299 | DNA | L13-2-35 |
| 1300 | DNA | L13-2-36 |
| 1301 | DNA | L13-2-38 |
| 1302 | DNA | L13-2-39 |
| 1303 | DNA | L13-2-40 |
| 1304 | DNA | L13-2-41 |
| 1305 | DNA | L13-2-42 |
| 1306 | DNA | L13-2-43 |
| 1307 | DNA | L13-2-44 |
| 1308 | DNA | L13-2-45 |
| 1309 | DNA | L13-2-46 |
| 1310 | DNA | L13-2-47 |
| 1311 | DNA | L13-2-48 |
| 1312 | DNA | L13-2-51 |
| 1313 | DNA | L13-2-52 |
| 1314 | DNA | L13-2-53 |
| 1315 | DNA | L13-2-54 |
| 1316 | DNA | L13-2-55 |
| 1317 | DNA | L13-2-56 |
| 1318 | DNA | L13-2-57 |
| 1319 | DNA | L13-2-58 |
| 1320 | DNA | L13-2-59 |
| 1321 | DNA | L13-2-60 |
| 1322 | DNA | L13-2-61 |
| 1323 | DNA | L13-2-62 |
| 1324 | DNA | L13-2-63 |
| 1325 | DNA | L13-2-64 |
| 1326 | DNA | L13-2-65 |
| 1327 | DNA | L13-2-66 |
| 1328 | DNA | L13-2-67 |
| 1329 | DNA | L13-2-68 |
| 1330 | DNA | L13-2-69 |
| 1331 | DNA | L13-2-70 |
| 1332 | DNA | L13-2-71 |
| 1333 | DNA | L13-2-72 |
| 1334 | DNA | L13-2-73 |
| 1335 | DNA | L13-2-74 |
| 1336 | DNA | L13-2-75 |
| 1337 | DNA | L15-01 |
| 1338 | DNA | L15-02 |
| 1339 | DNA | L15-03 |
| 1340 | DNA | L15-04 |
| 1341 | DNA | L15-05 |
| 1342 | DNA | L15-06 |
| 1343 | DNA | L15-07 |
| 1344 | DNA | L15-08 |
| 1345 | DNA | L15-10 |
| 1346 | DNA | L15-11 |
| 1347 | DNA | L15-12 |
| 1348 | DNA | L15-13 |
| 1349 | DNA | L15-14 |
| 1350 | DNA | L15-15 |
| 1351 | DNA | L15-16 |
| 1352 | DNA | L15-17 |
| 1353 | DNA | L15-18 |
| 1354 | DNA | L15-19 |
| 1355 | DNA | L15-20 |
| 1356 | DNA | L15-21 |
| 1357 | DNA | L15-22 |
| 1358 | DNA | L15-23 |
| 1359 | DNA | L15-25 |
| 1360 | DNA | L15-26 |
| 1361 | DNA | L15-27 |
| 1362 | DNA | L15-28 |
| 1363 | DNA | L15-29 |
| 1364 | DNA | L15-30 |
| 1365 | DNA | L15-31 |
| 1366 | DNA | L15-32 |
| 1367 | DNA | L15-33 |
| 1368 | DNA | L15-34 |
| 1369 | DNA | L15-35 |
| 1370 | DNA | L15-36 |
| 1371 | DNA | L15-37 |
| 1372 | DNA | L15-38 |
| 1373 | DNA | L15-39 |
| 1374 | DNA | L15-40 |
| 1375 | DNA | L15-41 |
| 1376 | DNA | L15-42 |
| 1377 | DNA | L15-43 |
| 1378 | DNA | L15-44 |
| 1379 | DNA | L15-45 |
| 1380 | DNA | L15-46 |
| 1381 | AA | L10-11(A04) |
| 1382 | AA | L10-13(A05) |
| 1383 | AA | L10-15(A06) |
| 1384 | AA | L10-30(A09) |
| 1385 | AA | L10-35(A11) |
| 1386 | AA | L10-46(B02) |
| 1387 | AA | L10-47(B03) |
| 1388 | AA | L10-54(B06) |
| 1389 | AA | L10-55(B07) |
| 1390 | AA | L10-59(B08) |
| 1391 | AA | L10-72(B10) |
| 1392 | AA | L10-84(B12) |
| 1393 | AA | L10-90(C02) |
| 1394 | AA | L11-17(C06) |
| 1395 | AA | L11-53(C09) |
| 1396 | AA | L12-1-03 |
| 1397 | AA | L12-1-06 |
| 1398 | AA | L12-1-09 |
| 1399 | AA | L12-1-10 |
| 1400 | AA | L12-1-11 |
| 1401 | AA | L12-1-12 |
| 1402 | AA | L12-1-16 |
| 1403 | AA | L12-1-17 |
| 1404 | AA | L12-1-19 |
| 1405 | AA | L12-1-20 |
| 1406 | AA | L12-1-21 |
| 1407 | AA | L12-1-22 |
| 1408 | AA | L12-2-13 |
| 1409 | AA | L12-2-14 |
| 1410 | AA | L12-2-15 |
| 1411 | AA | L12-2-20 |
| 1412 | AA | L12-2-22 |
| 1413 | AA | L12-2-23 |
| 1414 | AA | L12-2-27 |
| 1415 | AA | L12-2-33 |
| 1416 | AA | L12-2-39 |
| 1417 | AA | L12-2-48 |
| 1418 | AA | L12-2-49 |
| 1419 | AA | L12-2-50 |
| 1420 | AA | L13-1-01 |
| 1421 | AA | L13-1-02 |
| 1422 | AA | L13-1-03 |
| 1423 | AA | L13-1-04 |
| 1424 | AA | L13-1-05 |
| 1425 | AA | L13-1-06 |
| 1426 | AA | L13-1-07 |
| 1427 | AA | L13-1-08 |
| 1428 | AA | L13-1-09 |
| 1429 | AA | L13-1-10 |
| 1430 | AA | L13-1-11 |
| 1431 | AA | L13-1-12 |
| 1432 | AA | L13-1-13 |
| 1433 | AA | L13-1-14 |
| 1434 | AA | L13-1-15 |
| 1435 | AA | L13-1-16 |
| 1436 | AA | L13-1-17 |
| 1437 | AA | L13-1-18 |
| 1438 | AA | L13-1-19 |
| 1439 | AA | L13-1-20 |
| 1440 | AA | L13-1-21 |
| 1441 | AA | L13-1-22 |
| 1442 | AA | L13-1-23 |
| 1443 | AA | L13-1-24 |
| 1444 | AA | L13-1-25 |
| 1445 | AA | L13-1-26 |
| 1446 | AA | L13-1-27 |
| 1447 | AA | L13-1-28 |
| 1448 | AA | L13-1-29 |
| 1449 | AA | L13-1-30 |
| 1450 | AA | L13-1-31 |
| 1451 | AA | L13-1-32 |
| 1452 | AA | L13-1-33 |
| 1453 | AA | L13-1-34 |
| 1454 | AA | L13-1-35 |
| 1455 | AA | L13-1-36 |
| 1456 | AA | L13-1-37 |
| 1457 | AA | L13-1-38 |
| 1458 | AA | L13-1-39 |
| 1459 | AA | L13-1-40 |
| 1460 | AA | L13-1-41 |
| 1461 | AA | L13-1-42 |
| 1462 | AA | L13-1-43 |
| 1463 | AA | L13-1-44 |
| 1464 | AA | L13-1-45 |
| 1465 | AA | L13-1-47 |
| 1466 | AA | L13-1-48 |
| 1467 | AA | L13-2-13 |
| 1468 | AA | L13-2-14 |
| 1469 | AA | L13-2-15 |
| 1470 | AA | L13-2-16 |
| 1471 | AA | L13-2-17 |
| 1472 | AA | L13-2-18 |
| 1473 | AA | L13-2-19 |
| 1474 | AA | L13-2-20 |
| 1475 | AA | L13-2-21 |
| 1476 | AA | L13-2-22 |
| 1477 | AA | L13-2-23 |
| 1478 | AA | L13-2-24 |
| 1479 | AA | L13-2-27 |
| 1480 | AA | L13-2-28 |
| 1481 | AA | L13-2-29 |
| 1482 | AA | L13-2-30 |
| 1483 | AA | L13-2-31 |
| 1484 | AA | L13-2-32 |
| 1485 | AA | L13-2-33 |
| 1486 | AA | L13-2-34 |
| 1487 | AA | L13-2-35 |
| 1488 | AA | L13-2-36 |
| 1489 | AA | L13-2-38 |
| 1490 | AA | L13-2-39 |
| 1491 | AA | L13-2-40 |
| 1492 | AA | L13-2-41 |
| 1493 | AA | L13-2-42 |
| 1494 | AA | L13-2-43 |
| 1495 | AA | L13-2-44 |
| 1496 | AA | L13-2-45 |
| 1497 | AA | L13-2-46 |
| 1498 | AA | L13-2-47 |
| 1499 | AA | L13-2-48 |
| 1500 | AA | L13-2-51 |
| 1501 | AA | L13-2-52 |
| 1502 | AA | L13-2-53 |
| 1503 | AA | L13-2-54 |
| 1504 | AA | L13-2-55 |
| 1505 | AA | L13-2-56 |
| 1506 | AA | L13-2-57 |
| 1507 | AA | L13-2-58 |
| 1508 | AA | L13-2-59 |
| 1509 | AA | L13-2-60 |
| 1510 | AA | L13-2-61 |
| 1511 | AA | L13-2-62 |
| 1512 | AA | L13-2-63 |
| 1513 | AA | L13-2-64 |
| 1514 | AA | L13-2-65 |
| 1515 | AA | L13-2-66 |
| 1516 | AA | L13-2-67 |
| 1517 | AA | L13-2-68 |
| 1518 | AA | L13-2-69 |
| 1519 | AA | L13-2-70 |
| 1520 | AA | L13-2-71 |
| 1521 | AA | L13-2-72 |
| 1522 | AA | L13-2-73 |
| 1523 | AA | L13-2-74 |
| 1524 | AA | L13-2-75 |
| 1525 | AA | L15-01 |
| 1526 | AA | L15-02 |
| 1527 | AA | L15-03 |
| 1528 | AA | L15-04 |
| 1529 | AA | L15-05 |
| 1530 | AA | L15-06 |
| 1531 | AA | L15-07 |
| 1532 | AA | L15-08 |
| 1533 | AA | L15-10 |
| 1534 | AA | L15-11 |
| 1535 | AA | L15-12 |
| 1536 | AA | L15-13 |
| 1537 | AA | L15-14 |
| 1538 | AA | L15-15 |
| 1539 | AA | L15-16 |
| 1540 | AA | L15-17 |
| 1541 | AA | L15-18 |
| 1542 | AA | L15-19 |
| 1543 | AA | L15-20 |
| 1544 | AA | L15-21 |
| 1545 | AA | L15-22 |
| 1546 | AA | L15-23 |
| 1547 | AA | L15-25 |
| 1548 | AA | L15-26 |
| 1549 | AA | L15-27 |
| 1550 | AA | L15-28 |
| 1551 | AA | L15-29 |
| 1552 | AA | L15-30 |
| 1553 | AA | L15-31 |
| 1554 | AA | L15-32 |
| 1555 | AA | L15-33 |
| 1556 | AA | L15-34 |
| 1557 | AA | L15-35 |
| 1558 | AA | L15-36 |
| 1559 | AA | L15-37 |
| 1560 | AA | L15-38 |
| 1561 | AA | L15-39 |
| 1562 | AA | L15-40 |
| 1563 | AA | L15-41 |
| 1564 | AA | L15-42 |
| 1565 | AA | L15-43 |
| 1566 | AA | L15-44 |
| 1567 | AA | L15-45 |
| 1568 | AA | L15-46 |
| 1949 | DNA | L8-1A03 |
| 1950 | DNA | L8-1A04 |
| 1951 | DNA | L8-1A05 |
| 1952 | DNA | L8-1A06 |
| 1953 | DNA | L8-1B12 |
| 1954 | DNA | L8-1C02 |
| 1955 | DNA | L8-1C09 |
| 1956 | DNA | L8-1D03 |
| 1957 | DNA | L8-1D11 |
| 1958 | DNA | L8-1E02 |
| 1959 | DNA | L8-1E04 |
| 1960 | DNA | L8-2A08 |
| 1961 | DNA | L8-2B05 |
| 1962 | DNA | L8-2F04 |
| 1963 | DNA | L8-2F10 |
| 1964 | DNA | L8-2F12 |
| 1965 | DNA | L8-2H01 |
| 1966 | DNA | L8-3A04 |
| 1967 | DNA | L8-3A05 |
| 1968 | DNA | L8-3A06 |
| 1969 | DNA | L8-3A07 |
| 1970 | DNA | L8-3A10 |
| 1971 | DNA | L8-3A12 |
| 1972 | DNA | L8-3B02 |
| 1973 | DNA | L8-3B03 |
| 1974 | DNA | L8-3B05 |
| 1975 | DNA | L8-3B08 |
| 1976 | DNA | L8-3B09 |
| 1977 | DNA | L8-3D03 |
| 1978 | DNA | L8-3D04 |
| 1979 | DNA | L8-3D12 |
| 1980 | DNA | L8-3E05 |
| 1981 | DNA | L8-3E09 |
| 1982 | DNA | L8-3F01 |
| 1983 | DNA | L8-3F02 |
| 1984 | DNA | L8-3F06 |
| 1985 | DNA | L8-3F08 |
| 1986 | DNA | L8-3F09 |
| 1987 | DNA | CsL3-1A07 |
| 1988 | DNA | CsL3-1B04 |
| 1989 | DNA | CsL3-1B05 |
| 1990 | DNA | CsL3-1B11 |
| 1991 | DNA | CsL3-1C01 |
| 1992 | DNA | CsL3-1C12 |
| 1993 | DNA | CsL3-2A01 |
| 1994 | DNA | CsL3-2B06 |
| 1995 | DNA | CsL3-2B09 |
| 1996 | DNA | CsL3-2B12 |
| 1997 | DNA | CsL3-2D02 |
| 1998 | DNA | CsL3-2D10 |
| 1999 | DNA | CsL3-2D11 |
| 2000 | DNA | CsL3-2D12 |
| 2001 | DNA | CsL3-2E07 |
| 2002 | DNA | CsL3-2E08 |
| 2003 | DNA | CsL3-2E09 |
| 2004 | DNA | CsL3-2E10 |
| 2005 | DNA | CsL3-2E11 |
| 2006 | DNA | CsL3-2E12 |
| 2007 | DNA | CsL3-MTZ2 |
| 2008 | DNA | CsL3-MTZ3 |
| 2009 | DNA | CsL3-MTZ4 |
| 2010 | DNA | CsL3-MTZ5 |
| 2011 | DNA | CsL4.2-01 |
| 2012 | DNA | CsL4.2-04 |
| 2013 | DNA | CsL4.2-07 |
| 2014 | DNA | CsL4.2-08 |
| 2015 | DNA | CsL4.2-11 |
| 2016 | DNA | CsL4.2-12 |
| 2017 | DNA | CsL4.2-15 |
| 2018 | DNA | CsL4.2-16 |
| 2019 | DNA | CsL4.2-17 |
| 2020 | DNA | CsL4.2-18 |
| 2021 | DNA | CsL4.2-20 |
| 2022 | DNA | CsL4.2-21 |
| 2023 | DNA | CsL4.2-22 |
| 2024 | DNA | CsL4.2-23 |
| 2025 | DNA | CsL4.2-24 |
| 2026 | DNA | CsL4.2-26 |
| 2027 | DNA | CsL4.2-27 |
| 2028 | DNA | CsL4.2-28 |
| 2029 | DNA | CsL4.2-30 |
| 2030 | AA | L8-1A03 |
| 2031 | AA | L8-1A04 |
| 2032 | AA | L8-1A05 |
| 2033 | AA | L8-1A06 |
| 2034 | AA | L8-1B12 |
| 2035 | AA | L8-1C02 |
| 2036 | AA | L8-1C09 |
| 2037 | AA | L8-1D03 |
| 2038 | AA | L8-1D11 |
| 2039 | AA | L8-1E02 |
| 2040 | AA | L8-1E04 |
| 2041 | AA | L8-2A08 |
| 2042 | AA | L8-2B05 |
| 2043 | AA | L8-2F04 |
| 2044 | AA | L8-2F10 |
| 2045 | AA | L8-2F12 |
| 2046 | AA | L8-2H01 |
| 2047 | AA | L8-3A04 |
| 2048 | AA | L8-3A05 |
| 2049 | AA | L8-3A06 |
| 2050 | AA | L8-3A07 |
| 2051 | AA | L8-3A10 |
| 2052 | AA | L8-3A22 |
| 2053 | AA | L8-3B02 |
| 2054 | AA | L8-3B03 |
| 2055 | AA | L8-3B05 |
| 2056 | AA | L8-3B08 |
| 2057 | AA | L8-3B09 |
| 2058 | AA | L8-3D03 |
| 2059 | AA | L8-3D04 |
| 2060 | AA | L8-3D12 |
| 2061 | AA | L8-3E05 |
| 2062 | AA | L8-3E09 |
| 2063 | AA | L8-3F01 |
| 2064 | AA | L8-3F02 |
| 2065 | AA | L8-3F06 |
| 2066 | AA | L8-3F08 |
| 2067 | AA | L8-3F09 |
| 2068 | AA | CsL3-1A07 |
| 2069 | AA | CsL3-1B04 |
| 2070 | AA | CsL3-1B05 |
| 2071 | AA | CsL3-1B11 |
| 2072 | AA | CsL3-1C01 |
| 2073 | AA | CsL3-1C12 |
| 2074 | AA | CsL3-2A01 |
| 2075 | AA | CsL3-2B06 |
| 2076 | AA | CsL3-2B09 |
| 2077 | AA | CsL3-2B12 |
| 2078 | AA | CsL3-2D02 |
| 2079 | AA | CsL3-2D10 |
| 2080 | AA | CsL3-2D11 |
| 2081 | AA | CsL3-2D12 |
| 2082 | AA | CsL3-2E07 |
| 2083 | AA | CsL3-2E08 |
| 2084 | AA | CsL3-2E09 |
| 2085 | AA | CsL3-2E10 |
| 2086 | AA | CsL3-2E11 |
| 2087 | AA | CsL3-2E12 |
| 2088 | AA | CsL3-MTZ2 |
| 2089 | AA | CsL3-MTZ3 |
| 2090 | AA | CsL3-MTZ4 |
| 2091 | AA | CsL3-5 |
| 2092 | AA | CsL4.2-01 |
| 2093 | AA | CsL4.2-04 |
| 2094 | AA | CsL4.2-07 |
| 2095 | AA | CsL4.2-08 |
| 2096 | AA | CsL4.2-11 |
| 2097 | AA | CsL4.2-12 |
| 2098 | AA | CsL4.2-15 |
| 2099 | AA | CsL4.2-16 |
| 2100 | AA | CsL4.2-17 |
| 2101 | AA | CsL4.2-18 |
| 2102 | AA | CsL4.2-20 |
| 2103 | AA | CsL4.2-21 |
| 2104 | AA | CsL4.2-22 |
| 2105 | AA | CsL4.2-23 |
| 2106 | AA | CsL4.2-24 |
| 2107 | AA | CsL4.2-26 |
| 2108 | AA | CsL4.2-27 |
| 2109 | AA | CsL4.2-28 |
| 2110 | AA | CsL4.2-30 |
| 2111 | DNA | pHD2033-2036 |
| 2112 | DNA | pHD2037-2040 |

[0292] The following examples are provided to illustrate some embodiments of the invention, but should not be construed as defining or otherwise limiting any aspect, embodiment, element or any combinations thereof. Modifications of any aspect, embodiment, element or any combinations thereof are apparent to a person of skill in the art.

### EXPERIMENTAL

[0293] Chemical based control of transcription in plants with sulfonylurea (SU) herbicides via a modified tet-repressor based mechanism has been demonstrated (US20110294216). Although the strategy relies on repression/de-repression of fully functional promoters having embedded tet operator sequences (Gatz 1988; Frohberg 1991; Gatz 1992; Yao 1998), the mechanism could be modified to create a SU controlled transcriptional activator acting on a minimal promoter with upstream tet operators (Gossen 1995; Schonig 2002). However, as an alternative to transcriptional regulation, it is possible the level of target protein itself can be modulated directly through ligand-dependent stabilization (Johnson 1995, Banaszynski 2006, Lampson 2006, Iwamoto 2010). This would have the advantages of reducing genetic complexity to one expression cassette instead of two (transcriptional regulation requires one for the target gene and one for the transcriptional activator/repressor) and possibly enabling quicker response to ligand as both transcription and translation would have already reached steady state. The promoter driving expression of the destabilized protein could be constitutive, spatio-temporal specific, or inducible. Accumulation of the target gene product in any cell type would be dependent on the presence of the stabilizing ligand.

[0294] Chemical regulation of target protein accumulation has thus far been accomplished thru fusion to an established ligand-gated stability domain. This leads to destruction of the fused target protein in the absence of ligand in vivo. A potential drawback to this strategy is that in some cases the target protein will not perform well as a protein fusion even after stabilization. However, this could be circumvented by creating an intein whose stability is chemically regulated by fusion to a ligand-gated stability domain. The resulting intein would then be inserted into any polypeptide sequence of interest to create a destabilized pro-target protein. Upon ligand exposure the target::intein::target protein would accumulate and splicing would release fully mature target protein. Ligand gated intein function has been established in other laboratories (Mootz and Muir 2002; Buskirk et al 2004).

[0295] To further enhance regulation, protein and transcriptional switch mechanisms could be combined. As these would be orthogonal methods combining them should lead to synergy. In this regard it is anticipated that the current SU regulated repressor can be modified to create a transcriptional activator whose accumulation is self-regulated by cognate ligand. Observations by Lai et al. (2010) indicate that this may be possible since some reverse TetR transcriptional activators are indeed unstable and subject to proteasomal degradation in the absence of ligand. Even further improvement in regulation can be accomplished by having a SuR negatively regulating expression of a SU dependent activator as well as the target promoter. This would require the regulated promoter to have tet operator sequences located strategically for both repression and activation functionality and the presence of both repressor and activator proteins. Such additional steps may be necessary to enable control of very active gene products that require extremely low basal expression yet need to be significantly induced upon ligand exposure.

[0296] We have undertaken a study of our sulfonylurea repressors (SuR's) to determine if they can be modified to selectively accumulate in vivo in the presence of SU herbicides ethametsulfuron-methyl and chlorsulfuron. It has been determined that various mutations of TetR lead to decreased protease resistance of the purified proteins in an in vitro assay and that addition of the tetracycline analog ‘anhydrotetracycline’ can lead to improved protease resistance (Reichheld 2006, Resch 2008, Reichheld 2009). As a result of these findings Reichheld and Davidson (2006) indicated that an undisclosed mutated form of TetR was conditionally stabilized in yeast following tetracycline application (data not shown: discussion section) and that this property could be exploited to conditionally stabilize fusion partners for biotechnology applications. Also disclosed is that so called ‘reverse Tet repressors’, tend to be unstable and can be partially rescued with inducer. Structural studies of an L17G substitution in the DNA binding domain (DBD) of a chimeric TetR-BD that requires tetracycline as a co-repressor reveals a ligand dependent disorder/order shift (Resch et al. 2008). An in vivo study of various reverse repressors used to control gene expression in mammalian cells revealed their ubiquitin gated stability was greatly influenced by the presence of doxycycline (Lai et al. 2010). In contrast to the above examples, our proteins do not bind to tetracycline or anhydrotetracycline and the sequences are divergent thus it was not known if the published ‘destabilizing mutations’ would lead to destabilization of the SU repressors and if so whether herbicide addition could rescue stability. To test this concept, chemical dependent protein accumulation of various mutant ethametsulfuron repressors (EsR's) and chlorsulfuron repressors (CsR's) fused to AcGFP with and without potential destabilizing mutations in the DNA binding domain have been surveyed. We have found that both EsR and CsR GFP fusions with the DBD mutations show vastly increased green fluorescence in both yeast and plants when cognate ligand is present. This indicates that a protein switch mechanism based on the SuR scaffold has been developed and could be extended for use in many eukaryotic organisms.

### Example 1

### Ligand Enhanced TetR Fusion Protein Accumulation in Yeast

[0297] Three mutations in TetR shown to physically destabilize purified protein in the absence of inducer yet be partially suppressed by addition of atc were chosen for this study. Two of the mutations, L17G and G96R (Scholz et al. 2004), were shown to convert TetR into a co-repressor with cognate ligand atc. The third mutation, 122D (Reichheld and Davidson 2006), is a constitutive mutation in the presence or absence of ligand. Both L17G and I22D lie in the DNA binding domain (DBD) whereas G96R is in alpha helix 6 within the ligand binding domain (LBD). To test the effect of these mutations for ligand gated stability a GFP destabilization/re-stabilization assay (FIG. 1) was created. To do this a fusion between the coding regions of TetR B (Wray et al. 1981) and AcGFP (Gurskaya et al. 2003) by PCR amplifying the TetR region from plasmid pVER7568 using primers REPS' and TetR::AcGFP Rev and the AcGFP coding region from plasmid pHD1010 with primers TetR::AcGFP For and AcGFP3′ (Table 2) was created. The PCR products were then combined and subjected to overlap extension PCR using primers REPS' and AcGFP3′. The resulting full length PCR fusion product was then cloned into the Galactose inducible yeast expression vector p415GAL (ATCC#87330) as an XbaI/HindIII fragment. The resulting vector, pHD1184 (FIG. 2), was then subjected to in vitro mutagenesis (Quick Change mutagenesis—Stratagene) with the primers listed in Table 3 to generate pHD2012 [pGAL-TetR(L17G)], pHD2013 [pGAL-TetR(I22D)], and pHD2014 [pGAL-TetR(G96R)]. Each of these vectors were then transformed into S. cereviseae BY4742 (leu-, his-, ade-) and plated onto leu-knockout medium to select for LEU+ colonies. The transformed yeast strains were then grown overnight in minimal broth with ade, his, and 2% glucose and then subcultured into 2 ml of minimal media containing ade, his, and either 2% glucose, 2% galactose, or 2% galactose+10 uM anhydrotetracycline (atc). Following 6 hrs of growth 1 ml of cells were then centrifuged, washed in an equal volume of 1.2 M sorbitol and then resuspended in 250 ul of 1.2 M sorbitol. 100 ul aliquots of resuspended cells were placed into clear bottom black 96-well plates and their fluorescence determined with a Typhoon Laser Image Scanner (GE: emission at 488 nm and excitation at 520 nm). The data shown in FIG. 3 reveal that L17G and G96R mutations have a significant negative impact the accumulation of GFP compared to wt TetR. Interestingly, addition of atc to the medium greatly increased the relative GFP fluorescence in all samples. Thus it is likely that atc is improving the folding efficiency and/or overall stability of the fusion proteins.

[0298] Next, we wanted to determine if a similar ligand enhanced protein accumulation effect would translate to our SU repressor backbones. While the shuffled SU repressors have the same DNA binding domain as TetR B their ligand binding domains are greater than 15% different. Given the number of changes to the parent sequence and the 100% change in ligand preference it was not clear if they would behave in a similar manner. To test this concept, the ligand binding domains from wt and L17G TetR were substituted with EsR hits L13-23, L15-20, L15-20-M4, L15-20-M9, L15-20-M34 and CsR hits CsL4.2-15 and CsL4.2-20. This was done by PCR amplifying the above coding regions with primers REPS' and EsR(L3-23) Rev, EsR(L15-20) Rev, or CsR(L4-20) Rev (Table 2), digesting each PCR product with StuI/BamHI and cloning each product into StuI/BamHI digested backbone fragments of pHD1184 and pHD2012 to give both wt and L17G mutant DNA binding domain combinations, respectively for most of the SuR's (schematic in FIG. 4). The resulting vectors (Table 4) were then transformed into S. cereviseae BY4742 as for pHD1184 (above). Each strain was then grown overnight in YPD medium and the cultures arrayed in 96-well format such that there were four repeats of every strain per plate. The array was then stamped onto 40 ml DOBA agar supplemented with 2% galactose, 0.025% casamino acids, and either 10 uM atc, ethametsulfuron, chlorsulfuron or no addition as the control. The plates were grown two days at 30° C. and imaged using a Typhoon laser scanning imager (GE) with excitation and emission set at 488 and 520 nm respectively. The data (FIG. 5) show that ethametsulfuron repressors (EsR's) are more sensitive to destabilization from the introduced L17G mutation than TetR (compare wt vs L17G for each repressor in absence of ligand) and that the destabilized EsR::GFP fusion proteins respond in a robust manner to addition of Es such that they gain back nearly all the GFP fluorescence lost thru the mutation. Comparison of fold difference in GFP fluorescence between no ligand and 10 uM ligand for each of the L17G mutants (FIG. 6) show that the EsR::GFP fusions respond much more intensely to ligand than the TetR::GFP fusion. In a second experiment (using the same base medium, growth conditions, and data capture mechanism) the ligand sensitivity of the destabilized fusion proteins was examine using a dose response series from 0.1 uM to 10 uM (FIG. 7). The results show that all samples respond weakly at 0.1 uM and that the TetR derivative gives a ˜10× response at 5-10 uM atc whereas many of the EsR derivatives are even more responsive at the 0.5 uM Es dose. This indicates that the destabilized EsR::GFP hits are at least ten-fold more sensitive to ligand-gated re-stabilization than TetR. While the ligand response results for the EsR fusions were dramatic, those for the CsR fusions (CsL4-15 and CsL4-20) were only modest (FIGS. 6 and 7). At 10 uM chlorsulfuron (Cs) both CsR clones tested gave a ˜5× increase in GFP intensity which is up to 5× less than that for the best EsR clones and more equivalent to that seen for destabilized TetR::GFP. Interestingly some of the EsR clones responded significantly to Cs (˜6× increase in fluorescence). This is not surprising since it is known that cross reactivity occurs in these clones to Cs both in genetic and biochemical assays. Overall, these data indicate that stability of all SuR::GFP fusions responds to addition of SU ligands.

[0299] As the L17G mutation performed very well at differential stabilization of subject fusion proteins we sought to determine if this lesion imparted reverse repressor activity onto SuR the same as for TetR (Resch, M. et al. (2008) Nucl. Acids Res. 36:4391-4401). To test this possibility we mutated wt DBD regions of each repressor in the context of the E. coli pBAD expression vector system using oligonucleotides ‘TetR-L17G top’ (Seq ID 878) and ‘TetR-L17G bottom’ (Seq ID 879). After confirming mutations by DNA sequencing each clone was introduced into E. coli strain KM3 and B-galactosidase assays performed. Results show that none of the repressors including TetR exhibit reverse repression activity i.e. constitutive expression in the absence and repression in the presence and of inducer (FIG. 8). The lack of reverse repression activity for the L17G version of TetR(B) studied here relative to the published data for TetR(BD) indicates the lack of predictable effects from similar mutations in different backbones of the same repressor family.

### Example 2

### Sulfonylurea Dependent Protein Accumulation in Planta

[0300] To determine the effect of the L17G mutation on switchable protein stability in planta two series of vectors were constructed. Repressor::GFP fusions for L13-23, L15-20, L15-20-M4, and L15-20-M9 from each of the yeast vectors (above) were subcloned into a repressible plant expression entry clone pVER7581 NcoI to Asp718 to create plasmids pHD2029, pHD2030, pHD2031 and pHD2032, respectively. Each of these entry clones were then assembled into T-DNA vectors using T-DNA destination vector PHP39852, HRA containing sulfonylurea selectable marker entry vector pVER7573, and either with a blank entry clone or entry clone pVER7373 containing an auto-repressible L13-23 repressor cassette. The resulting eight vectors enable testing of the SU dependent protein stability switch by itself (pHD2033 thru pHD2036) and in combination with the transcriptional switch (pHD2036 thru pHD2040). These vectors were transformed into A. tumefaciens EHA105, co-cultivated with tobacco, and tissue selected on 50 ppb imazapyr and herbicide resistant/GFP(−) shoots regenerated into whole tobacco plants. Leaf disk samples were then tested for induction in 48-well microtiter array containing 200 ul of water with or without 2 ppm Ethametsulfuron. Leaf disks were incubated for three days in a Percival incubator set at 25° C. and then imaged with a Typhoon laser scanning imager (GE) as was done for the yeast cultures (above). Those events showing inducibility were tested for copy number by qPCR. Induction of GFP fluorescence in leaf disks of single copy events is shown in FIGS. 9 and 10. Results show that all repressor::GFP fusion proteins resulting from constructs pHD2033 thru pHD2036 respond to Ethametsulfuron treatment similar to what was seen in yeast: ˜5-20 fold enhanced fluorescence. When these repressor::GFP fusions were tested with a functional repressor (constructs pHD2037 thru pHD2040) there was greater control of expression due to repression of transcription in addition to protein stability (FIG. 10). Functional repression exhibited by these latter vectors/events indicates that the destabilized repressor does not cause trans-degradation of wt repressor or malfunction of its DNA binding capacity thru heterodimerization.

### BIBLIOGRAPHY

[0301] Gatz et al. (1988) Proc. Natl. Acad. Sci. USA. 85: 1394-1397.
[0302] Gatz et al. (1992) The Plant Journal 2: 397-404
[0303] Frohberg et al. (1991) Proc. Natl. Acad. Sci. USA. 88: 10470-10474.
[0304] Gossen et al. (1995) Science 268, 1766-1769.
[0305] Kai et al. (2002) Nucleic Acids Research. 30: e134
[0306] Yao et al. (1998) Human Gene Therapy 9:1939-1950
[0307] Buskirk et al. (2004) PNAS vol. 101 (29): 10505-10510
[0308] Mootz et al. (2002) J. Am. Chem. Soc., 124 (31), pp 9044-9045
[0309] Johnson, J A et al. (1995) J Biol. Chem. 270:8172-8178.
[0310] Banaszynski et al. (2006) Cell 126:995-1004.
[0311] Lai et al. (2004)J Gene Med 6: 1403-1413.
[0312] Lampson et al. (2006) Cell 126:827-829.
[0313] Iwamoto, M. et al. (2010) Chemistry and Biology 17:981-988.
[0314] Reichheld et al. (2006)J Mol. Biol. 361:382-389.
[0315] Reichheld et al. (2009) PNAS 106:22263-22268.
[0316] Resch, M. et al. (2008) Nucl. Acids Res. 36:4391-4401.
[0317] Scholz et al. (2004) Molecular Microbiology 2004. 53: 777-789.
[0318] Wray et al. (1981)J Bacteriol. 147, 297-304
[0319] Gurskaya et al. (2003) Biochem. J. 373: 403-408

TABLE 2

| Name | Description | Oligo Sequence | SEQ ID NO |
|---|---|---|---|
| REP5′ | adds Xba/Nco to 5′ end | ACACATCTAGAAACCATGGCCAGAC | 871 |
| | of all plant optimized | TCGACAAGAG | |
| | repressors | | |
| AcGFP3′ | adds Asp and Hind3 to | TGTGTAAGCTTGTTGGTACCTCACTT | 872 |
| | 3′ of AcGFP | GTACAGCTCATCCATGC | |
| TetR::Ac | top strand primer to | CTGAAGTGTGAAAGTGGGTCTGGAT | 873 |
| GFP For | create fusion between | CCGTGAGCAAGGGCGCCGAGCTG | |
| | TetR and AcGFP. Adds | | |
| | BamH1 site at the | | |
| | junction | | |
| TetR::Ac | bottom strand primer to | CAGCTCGGCGCCCTTGCTCACGGATC | 874 |
| GFP Rev | create fusion between | CAGACCCACTTTCACACTTCAG | |
| | TetR and AcGFP. Adds | | |
| | BamH1 site at the | | |
| | junction | | |
| EsR(L13- | Primes L13-23 and adds | GCTCACGGATCCAGATCCACTTTCAC | 875 |
| 23) Rev | BamH1 site to 3′ for | ACTTCAG | |
| | cloning into AcGFP | | |
| | fusion cassettes | | |
| EsR(L15- | Primes L15-20 and adds | GCTCACGGATCCAGACCCACTTTCGG | 876 |
| 20) Rev | BamH1 site to 3′ for | CCTTCAG | |
| | cloning into AcGFP | | |
| | fusion cassettes | | |
| CsR(L4- | Primes CsR(L4-20) and | GCTCACGGATCCAGACCCACTTTCTC | 877 |
| 20) Rev | adds BamH1 site to 3′ | TCTTCAG | |
| | for cloning into AcGFP | | |
| | fusion cassettes | | |

TABLE 3

| | | | SEQ |
|---|---|---|---|
| | | | ID |
| Name | Description | Oligo Sequence | NO |
| TetR- | TetR-AcGFP L17G | CGATTCCGACCTCGTTCCCCA | 878 |
| L17G | bottom strand | GCTCCAGTGCGCTGTTG | |
| Bottom | mutagenesis primer | | |
| TetR- | TetR-AcGFP L17G | CAACAGCGCACTGGAGCTGGG | 879 |
| L17G | top strand | GAACGAGGTCGGAATCG | |
| Top | mutagenesis primer | | |
| TetR- | TetR-AcGFP G96R | CTAGGTGGACCTTGGCTCGAT | 880 |
| G96R | bottom strand | CACGGTGACTGAGC | |
| Bottom | mutagenesis primer | | |
| TetR- | TetR-AcGFP G96R | GCTCAGTCACCGTGATCGAGC | 881 |
| G96R | top strand | CAAGGTCCACCTAG | |
| Top | mutagenesis primer | | |
| TetR- | TetR-AcGFP I22D | GCTGAACGAGGTCGGAGACGA | 882 |
| I22D | top stand | AGGCCTCACAACCCG | |
| Top | mutagenesis primer | | |
| TetR- | TetR-AcGFP I22D | CGGGTTGTGAGGCCTTCGTCT | 883 |
| I22D | bottom strand | CCGACCTCGTTCAGC | |
| Bottom | mutagenesis primer | | |

TABLE 4

| Name | Description |
|---|---|
| pHD1184 | Pgal-TetR::AcGFP/LEU2/AmpR |
| pHD2012 | Pgal-TetR(L17G)::AcGFP/LEU2/AmpR |
| pHD2013 | Pgal-TetR(I22D)::AcGFP/LEU2/AmpR |
| pHD2014 | Pgal-TetR(G96R)::AcGFP/LEU2/AmpR |
| pHD2015 | Pgal-EsR(L13-23)::AcGFP/LEU2/AmpR |
| pHD2016 | Pgal-EsR(L13-23-L17G)::AcGFP/LEU2/AmpR |
| pHD2017 | Pgal-EsR(L15-20)::AcGFP/LEU2/AmpR |
| pHD2018 | Pgal-EsR(L15-20-L17G)::AcGFP/LEU2/AmpR |
| pHD2019 | Pgal-EsR(L15-20-M4)::AcGFP/LEU2/AmpR |
| pHD2020 | Pgal-EsR(L15-20-M4-L17G)::AcGFP/LEU2/AmpR |
| pHD2021 | Pgal-EsR(L15-20-M9)::AcGFP/LEU2/AmpR |
| pHD2022 | Pgal-EsR(L15-20-M9-L17G)::AcGFP/LEU2/AmpR |
| pHD2023 | Pgal-EsR(L15-20-M34)::AcGFP/LEU2/AmpR |
| pHD2024 | Pgal-EsR(L15-20-M34-L17G)::AcGFP/LEU2/AmpR |
| pHD2025 | Pgal-CsR(4.2-15)::AcGFP/LEU2/AmpR |
| pHD2026 | Pgal-CsR(4.2-15-L17G)::AcGFP/LEU2/AmpR |
| pHD2027 | Pgal-CsR(4.2-20)::AcGFP/LEU2/AmpR |
| pHD2028 | Pgal-CsR(4.2-20-L17G)::AcGFP/LEU2/AmpR |

### Example 3

### Further Shuffling for Improved Ethametsulfuron Repressor Variants

### A. Fourth Round Shuffling

[0320] Fourth round shuffling was designed from phylogenetic alignments of TetR(B) homologues at 13 previously untested positions in addition to retesting selected substitutions at 23 previously shuffled positions. Also, the six cysteine residues aligning to wt TetR were varied with phylogenetically available diversity. This brought the total number of shuffled residues to 42. To screen this diversity two libraries, L10 and L11, were constructed (Table 5). As was done for L4 the diversity was titrated into the synthetic oligonucleotide mixture along with oligonucleotides representing parent clone L7-A11 to reduce the complexity of each individual clone (Table 6A-C).

TABLE 5
Diversity summary for libraries L10 thru L15.

| Residue | TetR (B) | | | | | |
|---|---|---|---|---|---|---|
| position | Residue | L10 | L11 | L12 | L13 | L15 |
| 55 | L | M | M | M | M | |
| 57 | I | IF | — | IF | — | |
| 60 | L | — | — | — | LF | |
| 61 | D | — | NED | — | — | |
| 62 | R | PR | — | PR | — | P [symbol] |
| 64 | H | A | A | A | ADEKR (SEQ ID | [symbol] QRT (SEQ |
| | | | | | NO: 2115) | ID NO: 2116) |
| 65 | T | [symbol] PT | — | [symbol] PT | — | IT |
| 66 | H | — | HQY | — | — | |
| 67 | F | LFY | Y | [symbol] F | Y | |
| 68 | C | LSC | LSC | LC | LC | |
| 69 | P | P [symbol] | — | L | — | |
| 71 | E | — | VE | — | — | |
| 73 | E | [symbol] E | — | AE | — | |
| 77 | D | — | DN | DNQ | — | DN |
| 82 | N | N [symbol] | — | [symbol] K | [symbol] [symbol] N | [symbol] N [symbol] |
| | | | | | | (SEQ ID |
| | | | | | | NO: 2117) |
| 86 | F | M | M | M | [symbol] R | |
| 88 | C | RNC | RNC | N | N | |
| 99 | V | [symbol] A | — | — | — | |
| 100 | H | C | C | C | C [symbol] | AC |
| 104 | R | G | GA | G | G | |
| 105 | P | FL | IVW [symbol] (SEQ | F | F | |
| | | | ID NO: 2118) | | | |
| 108 | K | Q | [symbol] N | Q | Q | [symbol] RK |
| 109 | Q | QN | — | — | — | |
| 113 | L | AT | LVI [symbol] | A | AM | AMQS (SEQ |
| | | | | | | ID NO: 2119) |
| 114 | E | — | — | — | — | |
| 116 | Q | SR | MQS | SRQ | [symbol] W | [symbol] W (SEQ |
| | | | | | | ID NO: 2120) |
| 121 | C | TC | [symbol] C | T | T | |
| 129 | N | — | NHQ | NQ | — | |
| 134 | L | MW | M | M | [symbol] G [symbol] | FMNR (SEQ |
| | | | | | | ID NO: 2121) |
| 135 | S | Q | RQ | Q | Q | |
| 136 | A | SAD | — | — | — | |
| 138 | G | — | [symbol] RA | — | — | |
| 139 | H | I | I | I | I | |
| 140 | F | Y | F [symbol] | Y | Y | |
| 144 | C | WAS [symbol] | S [symbol] | — | — | |
| | | (SEQ ID | | | | |
| | | NO: 2122) | | | | |
| 145 | V | VA | — | — | — | |
| 147 | E | — | [symbol] VW | L | L | |
| 151 | H | L | [symbol] RKM (SEQ | L | L | |
| | | | ID NO: 2123) | | | |
| 162 | T | — | QT | — | — | |
| 166 | M | MK | — | — | — | |
| 170 | L | VI | V | V | V | |
| 174 | I | L | LVW | L | FIL [symbol] (SEQ ID | [symbol] Y (SEQ ID |
| | | | | | NO: 2124) | NO: 2125) |
| 175 | E | EN | — | — | — | |
| 177 | F | K | [symbol] RQL (SEQ | K | H [symbol] R | [symbol] FNS (SEQ |
| | | | ID NO: 2126) | | | ID NO: 2127) |
| 183 | E | — | EDG | — | — | |
| 184 | P | PL | — | — | — | |
| 185 | A | — | AD | — | — | |
| 195 | C | SRAC (SEQ | SRAC (SEQ | S | S | |
| | | ID NO: 2128) | ID NO: 2128) | | | |
| 203 | C | SRAC (sEQ | SR [symbol] C (SEQ | A | A | |
| | | ID NO: 2128) | ID NO: 2128) | | | |

(—) = same as TetR
Italic = biased incorporation by design
BOLD and Oversized = Bias from screening
Residues in parentheses = unintended mutations

TABLE 6A
Oligonucleotides for assembly and rescue of Libraries L10 and
L11.

| Oligo | | | Pool |
|---|---|---|---|
| Name | SEQ ID No | Sequence | # |
| L10:1 | 890 | TGGCACGTCAAGAACAAGCGAGCTCTGCTAGACGCTATGGCC | 10a |
| L10:2 | 891 | ATCGAGATGCTCGATCSCCACGCTATACACTWCTTACYCTTG | 10b |
| L10:3 | 892 | TTCGAGATGCTCGATCSCCACGCTATACACTWCTTACYCTTG | |
| L10:4 | 893 | ATCGAGATGCTCGATCSCCACGCTATACACTWCWGTCYCTTG | |
| L10:5 | 894 | TTCGAGATGCTCGATCSCCACGCTATACACTWCWGTCYCTTG | |
| L10:6 | 895 | ATCGAGATGCTCGATCSCCACGCTATACACTTGTTACYCTTG | |
| L10:7 | 898 | TTCGAGATGCTCGATCSCCACGCTATACACTTGTTACYCTTG | |
| L10:8 | 897 | ATCGAGATGCTCGATCSCCACGCTATACACTTGWGTCYCTTG | |
| L10:9 | 898 | TTCGAGATGCTCGATCSCCACGCTATACACTTGWGTCYCTTG | |
| L10:10 | 899 | ATCGAGATGCTCGATCSCCACGCTMCCCACTWCTTACYCTTG | |
| L10:11 | 900 | TTCGAGATGCTCGATCSCCACGCTMCCCACTWCTTACYCTTG | |
| L10:12 | 901 | ATCGAGATGCTCGATCSCCACGCTMCCCACTWCWGTCYCTTG | |
| L10:13 | 902 | TTCGAGATGCTCGATCSCCACGCTMCCCACTWCWGTCYCTTG | |
| L10:14 | 903 | ATCGAGATGCTCGATCSCCACGCTMCCCACTTGTTACYCTTG | |
| L10:15 | 904 | TTCGAGATGCTCGATCSCCACGCTMCCCACTTGTTACYCTTG | |
| L10:16 | 905 | ATCGAGATGCTCGATCSCCACGCTMCCCACTTGWGTCYCTTG | |
| L10:17 | 906 | TTCGAGATGCTCGATCSCCACGCTMCCCACTTGWGTCYCTTG | |
| L10:18 | 907 | GAAGGGGMAAGCTGGCAAGACTTCTTGAGGAACAAMGCTAAG | 10c |
| L10:19 | 908 | TCCATGAGAAACGCTTTGCTCAGTCACCGTGATGGAGCCAAG | 10d |
| L10:20 | 909 | TCCATGAGAYGTGCTTTGCTCAGTCACCGTGATGGAGCCAAG | |
| L10:21 | 910 | GCGTGTCTAGGTACGGGCTTMACGGAGCAAAACTATGAAACT | 10e |
| L10:22 | 911 | GTGTGTCTAGGTACGGGCTTMACGGAGCAAAACTATGAAACT | |
| L10:23 | 912 | GCGTGTCTAGGTACGGGCTTMACGGAGCAACAATATGAAACT | |
| L10:24 | 913 | GTGTGTCTAGGTACGGGCTTMACGGAGCAACAATATGAAACT | |
| L10:25 | 914 | ACGGAGAACMGCCTTGCCTTCCTGTGTCAACAAGGTTTCTCC | 10f |
| L10:26 | 915 | GCGGAGAACMGCCTTGCCTTCCTGTGTCAACAAGGTTTCTCC | |
| L10:27 | 916 | ACGGAGAACMGCCTTGCCTTCCTGACGCAACAAGGTTTCTCC | |
| L10:28 | 917 | GCGGAGAACMGCCTTGCCTTCCTGACGCAACAAGGTTTCTCC | |
| L10:29 | 918 | CTTGAGAACGCCCTCTACGCATGGCAAGACSTGGGGATCTAC | 10g |
| L10:30 | 919 | CTTGAGAACGCCCTCTACGCATGGCAAKCASTGGGGATCTAC | |
| L10:31 | 920 | CTTGAGAACGCCCTCTACGCAATGCAAGACSTGGGGATCTAC | |
| L10:32 | 921 | CTTGAGAACGCCCTCTACGCAATGCAAKCASTGGGGATCTAC | |
| L10:33 | 922 | ACTCTGGGTTGSGYGTTGCTGGATCAAGAGCTGCAAGTCGCT | 10h |
| L10:34 | 923 | ACTCTGGGTKCGGYGTTGCTGGATCAAGAGCTGCAAGTCGCT | |
| L10:35 | 924 | AAGGAGGAGAGGGAAACACCTACTACTGATAGTAWGCCGCCA | 10i |
| L10:36 | 925 | CTGRTACGACAAGCTCTGAACCTCAAGGATCACCAAGGTGCA | 10j |
| L10:37 | 926 | CTGRTACGACAAGCTCTGGAACTCAAGGATCACCAAGGTGCA | |
| L10:38 | 927 | GAGCYCGCCTTCCTGTTCGGCCTTGAACTGATCATAGCTGGA | 10k |
| L10:39 | 928 | GAGCYCGCCTTCCTGTTCGGCCTTGAACTGATCATAHGCGGA | |
| L10:40 | 929 | TTGGAGAAGCAGCTGAAGGCTGAAAGTGGGTCTTAATGATAG | 10L |
| L10:41 | 930 | TTGGAGAAGCAGCTGAAGHGTGAAAGTGGGTCTTAATGATAG | |
| L10:42 | 931 | GTGGSGATCGAGCATCTCGAWGGCCATAGCGTCTAGCAGAGC | 10m |
| L10:43 | 932 | GTCTTGCCAGCTTKCCCCTTCCAAGRGTAAGWAGTGTATAGC | 10n |
| L10:44 | 933 | GTCTTGCCAGCTTKCCCCTTCCAAGRGACWGWAGTGTATAGC | |
| L10:45 | 934 | GTCTTGCCAGCTTKCCCCTTCCAAGRGTAACAAGTGTATAGC | |
| L10:46 | 935 | GTCTTGCCAGCTTKCCCCTTCCAAGRGACWCAAGTGTATAGC | |
| L10:47 | 935 | GTCTTGCCAGCTTKCCCCTTCCAAGRGTAAGWAGTGGGKAGC | |
| L10:48 | 937 | GTCTTGCCAGCTTKCCCCTTCCAAGRGACWGWAGTGGGKAGC | |
| L10:49 | 938 | GTCTTGCCAGCTTKCCCCTTCCAAGRGTAACAAGTGGGKAGC | |
| L10:50 | 939 | GTCTTGCCAGCTTKCCCCTTCCAAGRGACWCAAGTGGGKAGC | |
| L10:51 | 940 | GAGCAAAGCGTTTCTCATGGACTTAGCKTTGTTCCTCAAGAA | 10o |
| L10:52 | 941 | GAGCAAAGCACRTCTCATGGACTTAGCKTTGTTCCTCAAGAA | |
| L10:53 | 942 | GAAGCCCGTACCTAGACACRCCTTGGCTCCATCACGGTGACT | 10p |
| L10:54 | 943 | TAAGCCCGTACCTAGACACRCCTTGGCTCCATCACGGTGACT | |
| L10:55 | 944 | GAAGGCAAGGCKGTTCTCCGYAGTTTCATAGTTTTGCTCCGT | 10q |
| L10:56 | 945 | GAAGGCAAGGCKGTTCTCCGYAGTTTCATATTGTTGCTCCGT | |
| L10:57 | 946 | TGCGTAGAGGGCGTTCTCAAGGGAGAAACCTTGTTGACACAG | 10r |
| L10:58 | 947 | TGCGTAGAGGGCGTTCTCAAGGGAGAAACCTTGTTGCGTCAG | |
| L10:59 | 948 | CAGCAACRCSCAACCCAGAGTGTAGATCCCCASGTCTTGCCA | 10s |
| L10:60 | 949 | CAGCAACRCCGMACCCAGAGTGTAGATCCCCASGTCTTGCCA | |
| L10:61 | 950 | CAGCAACRCSCAACCCAGAGTGTAGATCCCCASTGMTTGCCA | |
| L10:62 | 951 | CAGCAACRCCGMACCCAGAGTGTAGATCCCCASTGMTTGCCA | |
| L10:63 | 952 | CAGCAACRCSCAACCCAGAGTGTAGATCCCCASGTCTTGCAT | |
| L10:64 | 953 | CAGCAACRCCGMACCCAGAGTGTAGATCCCCASGTCTTGCAT | |
| L10:65 | 954 | CAGCAACRCSCAACCCAGAGTGTAGATCCCCASTGMTTGCAT | |
| L10:66 | 955 | CAGCAACRCCGMACCCAGAGTGTAGATCCCCASTGMTTGCAT | |
| L10:67 | 956 | AGGTGTTTCCCTCTCCTCCTTAGCGACTTGCAGCTCTTGATC | 10t |
| L10:68 | 957 | GTTCAGAGCTTGTCGTAYCAGTGGCGGCWTACTATCAGTAGT | 10u |
| L10:69 | 968 | TTCCAGAGCTTGTCGTAYCAGTGGCGGCWTACTATCAGTAGT | |
| L10:70 | 959 | GCCGAACAGGAAGGCGRGCTCTGCACCTTGGTGATCCTTGAG | 10v |
| L10:71 | 960 | AGCCTTCAGCTGCTTCTCCAATCCAGCTATGATCAGTTCAAG | 10w |
| L10:72 | 961 | ACGCTTCAGCTGCTTCTCCAATCCAGCTATGATCAGTTCAAG | |
| L10:73 | 962 | ACTCTTCAGCTGCTTCTCCAATCCAGCTATGATCAGTTCAAG | |
| L10:74 | 963 | ACACTTCAGCTGCTTCTCCAATCCAGCTATGATCAGTTCAAG | |
| L10:75 | 964 | AGCCTTCAGCTGCTTCTCCAATCCGCDTATGATCAGTTCAAG | |
| L10:76 | 966 | ACGCTTCAGCTGCTTCTCCAATCCGCDTATGATCAGTTCAAG | |
| L10:77 | 966 | ACTCTTCAGCTGCTTCTCCAATCCGCDTATGATCAGTTCAAG | |
| L10:78 | 967 | ACACTTCAGCTGCTTCTCCAATCCGCDTATGATCAGTTCAAG | |
| L10:79 | 988 | GCGCCAAGGTACCTTCTGCAGCTATCATTAAGACCCACTTTC | 10x |

TABLE 6B

| | SEQ | | |
|---|---|---|---|
| Oligo | ID | | Pool |
| Name | NO | Sequence | # |
| L11:1 | 969 | TGGCACGTCAAGAACAAGCGAGCTCTGCTAGA | 11a |
| | | CGCTATGGCC | |
| L11:2 | 970 | ATTGAGATGCTCAACAGGCACGCTACCCASTA | 11b |
| | | CCTACCTTTG | |
| L11:3 | 971 | ATTGAGATGCTCAACAGGCACGCTACCCASTA | |
| | | CTSTCCTTTG | |
| L11:4 | 972 | ATTGAGATGCTCAACAGGCACGCTACCTATTA | |
| | | CCTACCTTTG | |
| L11:5 | 973 | ATTGAGATGCTCAACAGGCACGCTACCTATTA | |
| | | CTSTCCTTTG | |
| L11:6 | 974 | ATTGAGATGCTCGAKAGGCACGCTACCCASTA | |
| | | CCTACCTTTG | |
| L11:7 | 975 | ATTGAGATGCTCGAKAGGCACGCTACCCASTA | |
| | | CTSTCCTTTG | |
| L11:8 | 976 | ATTGAGATGCTCGAKAGGCACGCTACCTATTA | |
| | | CCTACCTTTG | |
| L11:9 | 977 | ATTGAGATGCTCGAKAGGCACGCTACCTATTA | |
| | | CTSTCCTTTG | |
| L11:10 | 978 | GWGGGGGAAAGCTGGCAARATTTCTTGAGGAA | 11c |
| | | CAACGCTAAG | |
| L11:11 | 979 | TCCATGAGAAATGCTTTGCTCAGTCACCGTGA | 11d |
| | | TGGAGCCAAG | |
| L11:12 | 980 | TCCATGAGAYGTGCTTTGCTCAGTCACCGTGA | |
| | | TGGAGCCAAG | |
| L11:13 | 981 | GTCTGTCTAGGTACGGSGDTCACGGAGAACCA | 11e |
| | | GTATGAAACT | |
| L11:14 | 982 | GTCTGTCTAGGTACGGSGDTCACGGAGCAACA | |
| | | GTATGAAACT | |
| L11:15 | 983 | GTCTGTCTAGGTACGGSGTGGACGGAGAACCA | |
| | | GTATGAAACT | |
| L11:16 | 984 | GTCTGTCTAGGTACGGSGTGGACGGAGCAACA | |
| | | GTATGAAACT | |
| L11:17 | 985 | CTTGAGAACTCACTTGCCTTCCTGTGCCAACA | 11f |
| | | AGGTTTCTCC | |
| L11:18 | 986 | GTTGAGAACTCACTTGCCTTCCTGTGCCAACA | |
| | | AGGTTTCTCC | |
| L11:19 | 987 | ATTGAGAACTCACTTGCCTTCCTGTGCCAACA | |
| | | AGGTTTCTCC | |
| L11:20 | 988 | CTTGAGAACTCACTTGCCTTCCTGACGCAACA | |
| | | AGGTTTCTCC | |
| L11:21 | 989 | GTTGAGAACTCACTTGCCTTCCTGACGCAACA | |
| | | AGGTTTCTCC | |
| L11:22 | 990 | ATTGAGAACTCACTTGCCTTCCTGACGCAACA | |
| | | AGGTTTCTCC | |
| L11:23 | 991 | CTTGAGAACCAGCTTGCCTTCCTGTGCCAACA | |
| | | AGGTTTCTCC | |
| L11:24 | 992 | GTTGAGAACCAGCTTGCCTTCCTGTGCCAACA | |
| | | AGGTTTCTCC | |
| L11:25 | 993 | ATTGAGAACCAGCTTGCCTTCCTGTGCCAACA | |
| | | AGGTTTCTCC | |
| L11:26 | 994 | CTTGAGAACCAGCTTGCCTTCCTGACGCAACA | |
| | | AGGTTTCTCC | |
| L11:27 | 995 | GTTGAGAACCAGCTTGCCTTCCTGACGCAACA | |
| | | AGGTTTCTCC | |
| L11:28 | 996 | ATTGAGAACCAGCTTGCCTTCCTGACGCAACA | |
| | | AGGTTTCTCC | |
| L11:29 | 997 | CTTGAGAACATGCTTGCCTTCCTGTGCCAACA | |
| | | AGGTTTCTCC | |
| L11:30 | 998 | GTTGAGAACATGCTTGCCTTCCTGTGCCAACA | |
| | | AGGTTTCTCC | |
| L11:31 | 999 | ATTGAGAACATGCTTGCCTTCCTGTGCCAACA | |
| | | AGGTTTCTCC | |
| L11:32 | 1000 | CTTGAGAACATGCTTGCCTTCCTGACGCAACA | |
| | | AGGTTTCTCC | |
| L11:33 | 1001 | GTTGAGAACATGCTTGCCTTCCTGACGCAACA | |
| | | AGGTTTCTCC | |
| L11:34 | 1002 | ATTGAGAACATGCTTGCCTTCCTGACGCAACA | |
| | | AGGTTTCTCC | |
| L11:35 | 1003 | GCCGAGAACTCACTTGCCTTCCTGTGCCAACA | |
| | | AGGTTTCTCC | |
| L11:36 | 1004 | GCCGAGAACTCACTTGCCTTCCTGACGCAACA | |
| | | AGGTTTCTCC | |
| L11:37 | 1005 | GCCGAGAACCAGCTTGCCTTCCTGTGCCAACA | |
| | | AGGTTTCTCC | |
| L11:38 | 1006 | GCCGAGAACCAGCTTGCCTTCCTGACGCAACA | |
| | | AGGTTTCTCC | |
| L11:39 | 1007 | GCCGAGAACATGCTTGCCTTCCTGTGCCAACA | |
| | | AGGTTTCTCC | |
| L11:40 | 1008 | GCCGAGAACATGCTTGCCTTCCTGACGCAACA | |
| | | AGGTTTCTCC | |
| L11:41 | 1009 | CTTGAGAATGCCCTCTACGCAATGCRGGCTGT | 11g |
| | | TCGGATCTWC | |
| L11:42 | 1010 | CTTGAGAATGCCCTCTACGCAATGCRGGCTGT | |
| | | TGSCATCTWC | |
| L11:43 | 1011 | CTTGAGCAWGCCCTCTACGCAATGCRGGCTGT | |
| | | TCGGATCTWC | |
| L11:44 | 1012 | CTTGAGCAWGCCCTCTACGCAATGCRGGCTGT | |
| | | TGSCATCTWC | |
| L11:45 | 1013 | ACTCTGGGTTSCGTCTTGTGGGATCAAGAGCT | 11h |
| | | ACAAGTCGCT | |
| L11:46 | 1014 | ACTCTGGGTTSCGTCTTGTGGGATCAAGAGAD | |
| | | GCAAGTCGCT | |
| L11:47 | 1015 | ACTCTGGGTTSCGTCTTGSTAGATCAAGAGCT | |
| | | ACAAGTCGCT | |
| L11:48 | 1016 | ACTCTGGGTTSCGTCTTGSTAGATCAAGAGAD | |
| | | GCAAGTCGCT | |
| L11:49 | 1017 | AAGGAGGAGAGGGAAACACCTACTACTGATAG | 11i |
| | | TATGCCGCCA | |
| L11:50 | 1018 | AAGGAGGAGAGGGAAACACCTCAGACTGATAG | |
| | | TATGCCGCCA | |
| L11:51 | 1019 | CTGGTTCGACAAGCTKTGGAACTCCDGGATCA | 11j |
| | | CCAAGGTGCA | |
| L11:52 | 1020 | CTGGTTCGACAAGCTKTGGAACTCAAAGATCA | |
| | | CCAAGGTGCA | |
| L11:53 | 1021 | CTGGTTCGACAAGCTTGGGAACTCCDGGATCA | |
| | | CCAAGGTGCA | |
| L11:54 | 1022 | CTGGTTCGACAAGCTTGGGAACTCAAAGATCA | |
| | | CCAAGGTGCA | |
| L11:55 | 1023 | GRWCCAGMTTTCCTGTTCGGCCTTGAACTGAT | 11k |
| | | CATAGCAGGA | |
| L11:56 | 1024 | GRWCCAGMTTTCCTGTTCGGCCTTGAACTGAT | |
| | | CATAHGCGGA | |
| L11:57 | 1025 | TTGGAGAAGCAGCTGAAGHGCGAAAGTGGGTC | 11L |
| | | TTAATGATAG | |
| L11:58 | 1026 | TTGGAGAAGCAGCTGAAGGCGGAAAGTGGGTC | |
| | | TTAATGATAG | |
| L11:59 | 1027 | GTGCCTGTTGAGCATCTCAATGGCCATAGCGT | 11m |
| | | CTAGCAGAGC | |
| L11:60 | 1028 | GTGCCTMTCGAGCATCTCAATGGCCATAGCGT | |
| | | CTAGCAGAGC | |
| L11:61 | 1029 | ATYTTGCCAGCTTTCCCCCWCCAAAGGTAGGT | 11n |
| | | ASTGGGTAGC | |
| L11:62 | 1030 | ATYTTGCCAGCTTTCCCCCWCCAAAGGASAGT | |
| | | ASTGGGTAGC | |
| L11:63 | 1031 | ATYTTGCCAGCTTTCCCCCWCCAAAGGTAGGT | |
| | | AATAGGTAGC | |
| L11:64 | 1032 | ATYTTGCCAGCTTTCCCCCWCCAAAGGASAGT | |
| | | AATAGGTAGC | |
| L11:65 | 1033 | GAGCAAAGCATTTCTCATGGACTTAGCGTTGT | 11o |
| | | TCCTCAAGAA | |
| L11:66 | 1034 | GAGCAAAGCACRTCTCATGGACTTAGCGTTGT | |
| | | TCCTCAAGAA | |
| L11:67 | 1035 | GAHCSCCGTACCTAGACAGACCTTGGCTCCAT | 11p |
| | | CACGGTGACT | |
| L11:68 | 1036 | CCACSCCGTACCTAGACAGACCTTGGCTCCAT | |
| | | CACGGTGACT | |
| L11:69 | 1037 | GAAGGCAAGTGAGTTCTCAABAGTTTCATACT | 11q |
| | | GGTTCTCCGT | |
| L11:70 | 1038 | GAAGGCAAGCTGGTTCTCAABAGTTTCATACT | |
| | | GGTTCTCCGT | |
| L11:71 | 1039 | GAAGGCAAGCATGTTCTCAABAGTTTCATACT | |
| | | GGTTCTCCGT | |
| L11:72 | 1040 | GAAGGCAAGTGAGTTCTCGGCAGTTTCATACT | |
| | | GGTTCTCCGT | |
| L11:73 | 1041 | GAAGGCAAGCTGGTTCTCGGCAGTTTCATACT | |
| | | GGTTCTCCGT | |
| L11:74 | 1042 | GAAGGCAAGCATGTTCTCGGCAGTTTCATACT | |
| | | GGTTCTCCGT | |
| L11:75 | 1043 | GAAGGCAAGTGAGTTCTCAABAGTTTCATACT | |
| | | GTTGCTCCGT | |
| L11:76 | 1044 | GAAGGCAAGCTGGTTCTCAABAGTTTCATACT | |
| | | GTTGCTCCGT | |
| L11:77 | 1045 | GAAGGCAAGCATGTTCTCAABAGTTTCATACT | |
| | | GTTGCTCCGT | |
| L11:78 | 1046 | GAAGGCAAGTGAGTTCTCGGCAGTTTCATACT | |
| | | GTTGCTCCGT | |
| L11:79 | 1047 | GAAGGCAAGCTGGTTCTCGGCAGTTTCATACT | |
| | | GTTGCTCCGT | |
| L11:80 | 1048 | GAAGGCAAGCATGTTCTCGGCAGTTTCATACT | |
| | | GTTGCTCCGT | |
| L11:81 | 1049 | TGCGTAGAGGGCATTCTCAAGGGAGAAACCTT | 11r |
| | | GTTGGCACAG | |
| L11:82 | 1050 | TGCGTAGAGGGCWTGCTCAAGGGAGAAACCTT | |
| | | GTTGGCACAG | |
| L11:83 | 1051 | TGCGTAGAGGGCATTCTCAAGGGAGAAACCTT | |
| | | GTTGCGTCAG | |
| L11:84 | 1052 | TGCGTAGAGGGCWTGCTCAAGGGAGAAACCTT | |
| | | GTTGCGTCAG | |
| L11:85 | 1053 | CCACAAGACGSAACCCAGAGTGWAGATCCGAA | 11s |
| | | CAGCCYGCAT | |
| L11:86 | 1054 | TASCAAGACGSAACCCAGAGTGWAGATCCGAA | |
| | | CAGCCYGCAT | |
| L11:87 | 1055 | CCACAAGACGSAACCCAGAGTGWAGATGSCAA | |
| | | CAGCCYGCAT | |
| L11:88 | 1056 | TASCAAGACGSAACCCAGAGTGWAGATGSCAA | |
| | | CAGCCYGCAT | |
| L11:89 | 1057 | AGGTGTTTCCCTCTCCTCCTTAGCGACTTGTA | 11t |
| | | GCTCTTGATC | |
| L11:90 | 1058 | AGGTGTTTCCCTCTCCTCCTTAGCGACTTGCH | |
| | | TCTCTTGATC | |
| L11:91 | 1059 | TTCCAMAGCTTGTCGAACCAGTGGCGGCATAC | 11u |
| | | TATCAGTAGT | |
| L11:92 | 1060 | TTCCCAAGCTTGTCGAACCAGTGGCGGCATAC | |
| | | TATCAGTAGT | |
| L11:93 | 1061 | TTCCAMAGCTTGTCGAACCAGTGGCGGCATAC | |
| | | TATCAGTCTG | |
| L11:94 | 1062 | TTCCCAAGCTTGTCGAACCAGTGGCGGCATAC | |
| | | TATCAGTCTG | |
| L11:95 | 1063 | GCCGAACAGGAAAKCTGGWYCTGCACCTTGGT | 11v |
| | | GATCCHGGAG | |
| L11:96 | 1064 | GCCGAACAGGAAAKCTGGWYCTGCACCTTGGT | |
| | | GATCTTTGAG | |
| L11:97 | 1065 | GCDCTTCAGCTGCTTCTCCAATCCTGCTATGA | 11w |
| | | TCAGTTCAAG | |
| L11:98 | 1066 | CGCCTTCAGCTGCTTCTCCAATCCTGCTATGA | |
| | | TCAGTTCAAG | |
| L11:99 | 1067 | GCDCTTCAGCTGCTTCTCCAATCCGCDTATGA | |
| | | TCAGTTCAAG | |
| L11:100 | 1068 | CGCCTTCAGCTGCTTCTCCAATCCGCDTATGA | |
| | | TCAGTTCAAG | |
| L11:101 | 1069 | GCGCCAAGGTACCTTCTGCAGCTATCATTAAG | 11x |
| | | ACCCACTTTC | |

TABLE 6C

| Oligo | SEQ ID | | |
|---|---|---|---|
| Name | NO | Sequence | Pool |
| EsRA11:1 | 1070 | TGGCACGTCAAGAACAAGCGAGCTCTGCTAGACGCTATGGCC | A11a |
| EsRA11:2 | 1071 | ATTGAGATGCTCGATAGGCACGCTACCCACTACTSTCCTTTG | A11b |
| EsRA11:3 | 1072 | ATTGAGATGCTCGATAGGCACGCTACCCACTACCTACCTTTG | |
| EsRA11:4 | 1073 | GAAGGGGAAAGCTGGCAAGACTTCTTGAGGAACAACGCTAAG | A11c |
| EsRA11:5 | 1074 | TCCATGAGAYGCGCTTTGCTCAGTCACCGTGATGGAGCCAAG | A11d |
| EsRA11:6 | 1075 | TCCATGAGAAATGCTTTGCTCAGTCACCGTGATGGAGCCAAG | |
| EsRA11:7 | 1076 | GTCTGTCTAGGTACGGGCTTCACGGAGCAACAGTATGAAACT | A11e |
| EsRA11:8 | 1077 | GCTGAGAACAGCCTTGCCTTCCTGACACAACAAGGTTTCTCC | A11f |
| EsRA11:9 | 1078 | GCTGAGAACAGCCTTGCCTTCCTGTGTCAACAAGGTTTCTCC | |
| EsRA11:10 | 1079 | CTTGAGAACGCCCICTACGCAATGCAAGCTGTTGGGATCTAC | A11g |
| EsRA11:11 | 1080 | ACTCTGGGTWGTGTCTTGCTGGATCAAGAGCTGCAAGTCGCT | A11h |
| EsRA11:12 | 1081 | AAGGAGGAGAGGGAAACACCTACTACTGATAGTATGCCGCCA | A11i |
| EsRA11:13 | 1082 | CTGGTTCGACAAGCTCTGGAACTCAAGGATCACCAAGGTGCA | A11j |
| EsRA11:14 | 1083 | GAGCCAGCCTTCCTGTTCGGCCTTGAACTGATCATAGCAGGA | A11k |
| EsRA11:15 | 1084 | GAGCCAGCCTTCCTGTTCGGCCTTGAACTGATCATAHGCGGA | |
| EsRA11:16 | 1085 | TTGGAGAAGCAGCTGAAGGCCGAAAGTGGGTCTTAATGATAG | A11L |
| EsRA11:17 | 1086 | TTGGAGAAGCAGCTGAAGHGTGAAAGTGGGTCTTAATGATAG | |
| EsRA11:18 | 1087 | GTGCCTATCGAGCATCTCAATGGCCATAGCGTCTAGCAGAGC | A11m |
| EsRA11:19 | 1088 | GTCTTGCCAGCTTTCCCCTTCCAAAGGASAGTAGTGGGTAGC | A11n |
| EsRA11:20 | 1089 | GTCTTGCCAGCTTTCCCCTTCCAAAGGTAGGTAGTGGGTAGC | |
| EsRA11:21 | 1090 | GAGCAAAGCGCRTCTCATGGACTTAGCGTTGTTCCTCAAGAA | A11o |
| EsRA11:22 | 1091 | GAGCAAAGCATTTCTCATGGACTTAGCGTTGTTCCTCAAGAA | |
| EsRA11:23 | 1092 | GAAGCCCGTACCTAGACAGACCTTGGCTCCATCACGGTGACT | A11p |
| EsRA11:24 | 1093 | GAAGGCAAGGCTGTTCTCAGCAGTTTCATACTGTTGCTCCGT | A11q |
| EsRA11:25 | 1094 | TGCGTAGAGGGCGTTCTCAAGGGAGAAACCTTGTTGTGTCAG | A11r |
| EsRA11:26 | 1095 | TGCGTAGAGGGCGTTCTCAAGGGAGAAACCTTGTTGACACAG | |
| EsRA11:27 | 1096 | CAGCAAGACACWACCCAGAGTGTAGATCCCAACAGCTTGCAT | A11s |
| EsRA11:28 | 1097 | AGGTGTTTCCCTCTCCTCCTTAGCGACTTGCAGCTCTTGATC | A11t |
| EsRA11:29 | 1098 | TTCCAGAGCTTGTCGAACCAGTGGCGGCATACTATCAGTAGT | A11u |
| EsRA11:30 | 1099 | GCCGAACAGGAAGGCTGGCTCTGCACCTTGGTGATCCTTGAG | A11v |
| EsRA11:31 | 1100 | GGCCTTCAGCTGCTTCTCCAATCCTGCTATGATCAGTTCAAG | A11w |
| EsRA11:32 | 1101 | ACDCTTCAGCTGCTTCTCCAATCCTGCTATGATCAGTTCAAG | |
| EsRA11:33 | 1102 | GGCCTTCAGCTGCTTCTCCAATCCGCDTATGATCAGTTCAAG | |
| EsRA11:34 | 1103 | ACDCTTCAGCTGCTTCTCCAATCCGCDTATGATCAGTTCAAG | |
| EsRA11:35 | 1104 | GCGCCAAGGTACCTTCTGCAGCTATCATTAAGACCCACTTTC | A11x |
| SynSU5′ | 1105 | CACGTCAAGAACAAGCGAGCTCTGCTAGAC | |
| SynSU3′ | 1106 | GGAACTTCGGCGCGCCAAGGTACCTTCTGCAGCTATC | |

[0321] Following library assembly and cloning approximately 100-L10 and 130-L11 putative hits were identified from ˜20,000 repressor positive clones. The clones were re-arrayed and ranked for repressor and ligand activity by relative colony color on M9 X-gal indicator (U.S. Utility application Ser. No. 13/086,765, filed on Apr. 14, 2011 and in US Application Publication 2010-0105141, both of which are herein incorporated by reference in their entirety) plates containing 0, 1.5 and 7 ppb ethametsulfuron. All putative hits and 180 random clones from each library were sequenced and the data sets compared to create sequence activity relationships (Table 5). Library 10 results show P69L, E73A, and N82K substitutions are biased in improved clones while C144 was strongly selected over the diversity as 31 vs. 11; 31 vs. 10; 28 vs. 4; and 85 vs. 42% of the hits contained these residues compared to the randomly selected population, respectively. Although 157F was poorly incorporated in the library (none in the random population), it was found in 5% of the hit population—mostly associated with the top ligand responsive clones. Incorporation data for L11 shows that residues G104, F105, Q108, A113, Q135, G138, Y140, C144, L147, L151, and K177 were all nearly 100% conserved. The results for positions 104, 105, 135, 147, and 151 corroborate the results for the in vitro mutagenesis study showing these residues to be highly important for activity. Additionally, residues 68C and S116 were also selectively maintained over optional diversity while C121T and C203A were both preferred as 71 vs. 45 and 56 vs. 35% of the respective hits vs. random clones contained these latter changes. Top hits from libraries L10 and L11 are shown in Table 7.

### B. Fifth Round Shuffling

[0322] One of the key and often overlooked aspects of any gene switch is maintenance of a very low level of expression in the ‘off’ state. To enhance the stringency of the in vivo repressor assay a new library vector, pVER7571, was constructed with a mutated ribosome binding site to lower the basal level of repressor produced in our assay strain and thus enhance the sensitivity of ‘leakiness’ detection. Library L12 was constructed in this new vector. Library L12 focused on reiterative shuffling of positive residue diversity from libraries L10 & L11 and (Table 5). Library L12 was constructed from thirty-two oligonucleotides (Table 8).

TABLE 8
Oligonucleotides for assembly of library L12.

| | | SEQ |
|---|---|---|
| | | ID |
| Oligo | Sequence | NO |
| L12:1 | TGGCACGTCAAGAACAAGCGAGCTCTGCTAGACGCTAT | 1107 |
| | GGCC | |
| L12:2 | ATCGAGATGCTCGATCSCCACGCTATACACTWTTTACY | 1108 |
| | ATTG | |
| L12:3 | TTCGAGATGCTCGATCSCCACGCTATACACTWTTTACY | 1109 |
| | ATTG | |
| L12:4 | ATCGAGATGCTCGATCSCCACGCTMCCCACTWTTTACY | 1110 |
| | ATTG | |
| L12:5 | TTCGAGATGCTCGATCSCCACGCTMCCCACTWTTTACY | 1111 |
| | ATTG | |
| L12:6 | GAAGGGGMAAGCTGGCAAAATTTCTTGAGGAACAAMGC | 1112 |
| | TAAG | |
| L12:7 | TCCATGAGAAACGCTTTGCTCAGTCACCGTGATGGAGC | 1113 |
| | CAAG | |
| L12:8 | GTCTGTCTAGGTACGGGCTTCACGGAGCAACAATATGA | 1114 |
| | AACT | |
| L12:9 | GCGGAGAACCGCCTTGCCTTCCTGACACAACAAGGTTT | 1115 |
| | CTCC | |
| L12:10 | CTTGAGAACGCCCTCTACGCATGGCAAGCAGTGGGGAT | 1116 |
| | CTAC | |
| L12:11 | CTTGAGCAGGCCCTCTACGCATGGCAAGCAGTGGGGAT | 1117 |
| | CTAC | |
| L12:12 | ACTCTGGGTTGTGTCTTGCTGGATCAAGAGCTGCAAGT | 1118 |
| | CGCT | |
| L12:13 | AAGGAGGAGAGGGAAACACCTACTACTGATAGTATGCC | 1119 |
| | GCCA | |
| L12:14 | CTGGTTCGACAAGCTKTAGAACTCAAGGATCACCAAGG | 1120 |
| | TGCA | |
| L12:15 | CTGGTTCGACAAGCTTGGGAACTCAAGGATCACCAAGG | 1121 |
| | TGCA | |
| L12:16 | GAGCCAGCCTTCCTGTTCGGCCTTGAACTGATCATATC | 1122 |
| | AGGA | |
| L12:17 | TTGGAGAAGCAGCTGAAGGCAGAAAGTGGGTCTTAATG | 1123 |
| | ATAG | |
| L12:18 | GTGGSGATCGAGCATCTCGAWGGCCATAGCGTCTAGCA | 1124 |
| | GAGC | |
| L12:19 | ATTTTGCCAGCTTKCCCCTTCCAATRGTAAAWAGTGTA | 1125 |
| | TAGC | |
| L12:20 | ATTTTGCCAGCTTKCCCCTTCCAATRGTAAAWAGTGGG | 1126 |
| | KAGC | |
| L12:21 | GAGCAAAGCGTTTCTCATGGACTTAGCKTTGTTCCTCA | 1127 |
| | AGAA | |
| L12:22 | GAAGCCCGTACCTAGACAGACCTTGGCTCCATCACGGT | 1128 |
| | GACT | |
| L12:23 | GAAGGCAAGGCGGTTCTCCGCAGTTTCATATTGTTGCT | 1129 |
| | CCGT | |
| L12:24 | TGCGTAGAGGGCGTTCTCAAGGGAGAAACCTTGTTGTG | 1130 |
| | TCAG | |
| L12:25 | TGCGTAGAGGGCCTGCTCAAGGGAGAAACCTTGTTGTG | 1131 |
| | TCAG | |
| L12:26 | CAGCAAGACACAACCCAGAGTGTAGATCCCCACTGCTT | 1132 |
| | GCCA | |
| L12:27 | AGGTGTTTCCCTCTCCTCCTTAGCGACTTGCAGCTCTT | 1133 |
| | GATC | |
| L12:28 | TTCTAMAGCTTGTCGAACCAGTGGCGGCATACTATCAG | 1134 |
| | TAGT | |
| L12:29 | TTCCCAAGCTTGTCGAACCAGTGGCGGCATACTATCAG | 1135 |
| | TAGT | |
| L12:30 | GCCGAACAGGAAGGCTGGCTCTGCACCTTGGTGATCCT | 1136 |
| | TGAG | |
| L12:31 | TGCCTTCAGCTGCTTCTCCAATCCTGATATGATCAGTT | 1137 |
| | CAAG | |
| L12:32 | GCGCCAAGGTACCTTCTGCAGCTATCATTAAGACCCAC | 1138 |
| | TTTC | |

[0323] Approximately 10,000 clones from library L12 were screened using the genetic plate assay with no inducer to detect leaky B-gal expression and then addition of 2 ppb ethametsulfuron plus and minus 0.002% arabinose. The latter treatment increases the stringency of induction since arabinose induces repressor production. Sixty-six putative hits were ranked for activity and their sequences determined. Sequences were also determined from a population of 94 random clones and the two data sets compared. The data showed that wt TetR residues 157, R62, P69, E73, and N82 and substitutions T651 and F67Y were preferred. With the exception of E73 and N82 the preferences were modest. An alignment of the top hits from L12 is shown in Table 7.

### C. Sixth Round Shuffling

[0324] A sixth round of shuffling using vector pVER7571 incorporated the best diversity from Rd5 shuffling (Table 5). The fully synthetic library was constructed from oligonucleotides shown in Table 9. 7,500 clones were screened by the M9 X-gal plate based assay for repression in the absence of any inducers and induction in the presence of 2 ppb Es+/−0.002% arabinose. Forty-six putative hits were re-arrayed and replica plated onto the same series of M9 X-gal assay plates. The hits were ranked for induction and repression and their sequences determined in addition to 92 randomly selected clones. Sequence analysis of the hit population show that N82, W116, and to a lesser extent Y174 were strongly selected against relative to the alternative diversity (2 vs 25; 0 vs. 41; and 9 vs. 45%, respectively). Also, within the top performing group of hits W82, F134, A177, and to a lesser degree Q108 were selected for improved activity relative to the alternative diversity at these positions. Sequences of L15 hits are shown in Table 7.

TABLE 9
Oligonucleotides for assembly of library L15.

| | | SEQ |
|---|---|---|
| Oligo | | ID |
| Name | Sequence | NO |
| L15:1 | TGGCACGTCAAGAACAAGCGAGCTCTGCTAGACGCTA | 1139 |
| | TGGCC | |
| L15:2 | ATAGAGATGCTCGATCSGCACCAAAYTCACTACTTAC | 1140 |
| | CCTTG | |
| L15:3 | ATAGAGATGCTCGATCSGCACAVGAYTCACTACTTAC | 1141 |
| | CCTTG | |
| L15:4 | GAAGGGGAAAGCTGGCAARATTTCTTGAGGAACWGGG | 1142 |
| | CTAAG | |
| L15:5 | GAAGGGGAAAGCTGGCAARATTTCTTGAGGAACAAKG | 1143 |
| | CTAAG | |
| L15:6 | TCCATGAGAAATGCTTTGCTCAGTCACCGTGATGGAG | 1144 |
| | CCAAG | |
| L15:7 | GTCGCACTAGGTACGGGCTTCACGGAGMRACAATATG | 1145 |
| | AAACT | |
| L15:8 | GTCTGTCTAGGTACGGGCTTCACGGAGMRACAATATG | 1146 |
| | AAACT | |
| L15:9 | ATGGAGAACTSGCTTGCCTTCCTGACACAACAAGGTT | 1147 |
| | TCTCC | |
| L15:10 | ATGGAGAACAASCTTGCCTTCCTGACACAACAAGGTT | 1148 |
| | TCTCC | |
| L15:11 | CAAGAGAACTSGCTTGCCTTCCTGACACAACAAGGTT | 1149 |
| | TCTCC | |
| L15:12 | CAAGAGAACAASCTTGCCTTCCTGACACAACAAGGTT | 1150 |
| | TCTCC | |
| L15:13 | GCTGAGAACTSGCTTGCCTTCCTGACACAACAAGGTT | 1151 |
| | TCTCC | |
| L15:14 | TCTGAGAACTSGCTTGCCTTCCTGACACAACAAGGTT | 1152 |
| | TCTCC | |
| L15:15 | GCTGAGAACAASCTTGCCTTCCTGACACAACAAGGTT | 1153 |
| | TCTCC | |
| L15:16 | TCTGAGAACAASCTTGCCTTCCTGACACAACAAGGTT | 1154 |
| | TCTCC | |
| L15:17 | CTTGAGAACGCCCTCTACGCATTCCAAGCAGTGGGGA | 1155 |
| | TCTAC | |
| L15:18 | CTTGAGAACGCCCTCTACGCAAKGCAAGCAGTGGGGA | 1156 |
| | TCTAC | |
| L15:19 | CTTGAGAACGCCCTCTACGCAAATCAAGCAGTGGGGA | 1157 |
| | TCTAC | |
| L15:20 | ACTCTGGGTTGTGTCTTGCTGGATCAAGAGCTGCAAG | 1158 |
| | TCGCT | |
| L15:21 | AAGGAGGAGAGGGAAACACCTACTACTGATAGTATGC | 1159 |
| | CGCCA | |
| L15:22 | CTGGTTCGACAAGCTTACGAACTCGCGGATCACCAAG | 1160 |
| | GTGCA | |
| L15:23 | CTGGTTCGACAAGCTTACGAACTCTYCGATCACCAAG | 1161 |
| | GTGCA | |
| L15:24 | CTGGTTCGACAAGCTTACGAACTCAATGATCACCAAG | 1162 |
| | GTGCA | |
| L15:25 | CTGGTTCGACAAGCTDTTGAACTCGCGGATCACCAAG | 1163 |
| | GTGCA | |
| L15:26 | CTGGTTCGACAAGCTDTTGAACTCTYCGATCACCAAG | 1164 |
| | GTGCA | |
| L15:27 | CTGGTTCGACAAGCTDTTGAACTCAATGATCACCAAG | 1165 |
| | GTGCA | |
| L15:28 | GAGCCAGCCTTCCTGTTCGGCCTTGAACTGATCATAT | 1166 |
| | CAGGA | |
| L15:29 | TTGGAGAAGCAGCTGAAGGCCGAAAGTGGGTCTTAAT | 1167 |
| | GATAG | |
| L15:30 | GTGCSGATCGAGCATCTCTATGGCCATAGCGTCTAGC | 1168 |
| | AGAGC | |
| L15:31 | ATYTTGCCAGCTTTCCCCTTCCAAGGGTAAGTAGTGA | 1169 |
| | RTTTG | |
| L15:32 | ATYTTGCCAGCTTTCCCCTTCCAAGGGTAAGTAGTGA | 1170 |
| | RTCBT | |
| L15:33 | GAGCAAAGCATTTCTCATGGACTTAGCCCWGTTCCTC | 1171 |
| | AAGAA | |
| L15:34 | GAGCAAAGCATTTCTCATGGACTTAGCMTTGTTCCTC | 1172 |
| | AAGAA | |
| L15:35 | GAAGCCCGTACCTAGTGCGACCTTGGCTCCATCACGG | 1173 |
| | TGACT | |
| L15:36 | GAAGCCCGTACCTAGACAGACCTTGGCTCCATCACGG | 1174 |
| | TGACT | |
| L15:37 | GAAGGCAAGCSAGTTCTCCATAGTTTCATATTGTYKC | 1175 |
| | TCCGT | |
| L15:38 | GAAGGCAAGSTTGTTCTCCATAGTTTCATATTGTYKC | 1176 |
| | TCCGT | |
| L15:39 | GAAGGCAAGCSAGTTCTCTTGAGTTTCATATTGTYKC | 1177 |
| | TCCGT | |
| L15:40 | GAAGGCAAGSTTGTTCTCTTGAGTTTCATATTGTYKC | 1178 |
| | TCCGT | |
| L15:41 | GAAGGCAAGCSAGTTCTCAGMAGTTTCATATTGTYKC | 1179 |
| | TCCGT | |
| L15:42 | GAAGGCAAGSTTGTTCTCAGMAGTTTCATATTGTYKC | 1180 |
| | TCCGT | |
| L15:43 | TGCGTAGAGGGCGTTCTCAAGGGAGAAACCTTGTTGT | 1181 |
| | GTCAG | |
| L15:44 | CAGCAAGACACAACCCAGAGTGTAGATCCCCACTGCT | 1182 |
| | TGGAA | |
| L15:45 | CAGCAAGACACAACCCAGAGTGTAGATCCCCACTGCT | 1183 |
| | TGCMT | |
| L15:46 | CAGCAAGACACAACCCAGAGTGTAGATCCCCACTGCT | 1184 |
| | TGATT | |
| L15:47 | AGGTGTTTCCCTCTCCTCCTTAGCGACTTGCAGCTCT | 1185 |
| | TGATC | |
| L15:48 | TTCGTAAGCTTGTCGAACCAGTGGCGGCATACTATCA | 1186 |
| | GTAGT | |
| L15:49 | TTCAAHAGCTTGTCGAACCAGTGGCGGCATACTATCA | 1187 |
| | GTAGT | |
| L15:50 | GCCGAACAGGAAGGCTGGCTCTGCACCTTGGTGATCC | 1188 |
| | GCGAG | |
| L15:51 | GCCGAACAGGAAGGCTGGCTCTGCACCTTGGTGATCG | 1189 |
| | RAGAG | |
| L15:52 | GCCGAACAGGAAGGCTGGCTCTGCACCTTGGTGATCA | 1190 |
| | TTGAG | |
| L15:53 | GGCCTTCAGCTGCTTCTCCAATCCTGATATGATCAGT | 1191 |
| | TCAAG | |
| L15:54 | GCGCCAAGGTACCTTCTGCAGCTATCATTAAGACCCA | 1192 |
| | CTTTC | |

TABLE 7
Sequence summary of top hits from Libraries L10, L11, L12, L13, and L15.

| | Sequence Position/Residue Substitution | | | | | | | | | | | | | | | | | | | | | | | |
|---|---|---|---|---|---|---|---|---|---|---|---|---|---|---|---|---|---|---|---|---|---|---|---|---|
| Clone | 55 | 57 | 60 | 61 | 62 | 64 | 65 | 67 | 68 | 69 | 72 | 73 | 75 | 77 | 82 | 85 | 86 | 88 | 92 | 99 | 100 | 101 | 104 | 105 |
| TetR (B) | L | I | L | D | R | H | T | F | C | P | G | E | W | D | N | S | F | C | S | V | H | L | R | P |
| L10-A04 | M | — | — | — | — | A | — | Y | — | — | — | — | — | — | K | — | M | N | — | — | C | — | G | F |
| L10-A05 | M | — | — | — | — | A | — | Y | — | — | — | — | — | — | K | — | M | — | — | — | C | — | G | F |
| L10-A06 | M | — | — | — | — | A | — | Y | L | — | — | A | — | — | K | — | M | N | — | — | C | — | G | F |
| L10-A09 | M | — | — | — | P | A | I | L | L | — | — | A | — | — | — | — | M | R | — | — | C | — | G | F |
| L10-A11 | M | — | — | — | — | A | — | Y | L | — | — | — | — | — | K | — | M | — | — | — | C | — | G | F |
| L10-B02 | M | — | — | — | P | A | — | — | — | L | — | — | — | — | — | — | M | N | — | — | C | — | G | F |
| L10-B03 | M | — | — | — | — | A | — | Y | S | — | — | — | — | — | K | — | M | — | — | — | C | — | G | F |
| L10-B06 | M | — | — | — | P | A | P | L | L | — | — | A | — | — | — | — | M | — | — | — | C | — | G | F |
| L10-B07 | M | — | — | — | — | A | I | L | L | — | — | — | — | — | — | — | M | — | — | — | C | — | G | F |
| L10-B08 | M | — | — | — | — | A | — | Y | L | — | — | A | — | — | K | — | M | R | — | — | C | — | G | F |
| L11-C02 | M | — | — | — | P | A | — | Y | S | — | — | — | — | — | K | — | M | — | — | — | C | — | G | F |
| L11-C06 | M | — | — | — | — | A | — | Y | S | — | R | — | — | N | — | — | M | N | — | — | C | — | G | F |
| L12-1-10 | M | F | — | — | — | A | I | — | L | — | — | A | — | N | T | — | M | N | — | — | C | — | G | F |
| L12-1-11 | M | F | — | — | P | A | I | Y | L | — | — | — | — | N | H | — | M | N | — | — | C | — | G | F |
| L12-1-21 | M | F | — | — | — | A | P | Y | L | — | — | A | — | N | — | — | M | N | — | — | C | — | G | F |
| L12-2-13 | M | — | — | — | — | A | I | Y | L | — | — | A | — | N | — | — | M | N | — | — | C | — | G | F |
| L12-2-23 | M | F | — | — | — | A | — | Y | L | — | — | — | — | N | — | — | M | N | — | — | C | — | G | F |
| L12-2-27 | M | F | — | — | — | A | I | Y | L | — | — | A | — | N | — | — | M | N | — | L | C | — | G | F |
| L12-2-48 | M | — | — | — | — | A | I | Y | L | — | — | — | — | N | — | — | M | N | — | — | C | — | G | F |
| L13-1-9 | M | — | — | — | — | A | — | Y | — | — | — | — | — | — | K | — | M | N | — | — | A | — | G | F |
| L13-1-10 | M | — | F | — | — | D | — | Y | — | — | — | — | C | — | K | — | M | N | — | — | A | — | G | F |
| L13-1-16 | M | — | F | — | — | K | — | Y | — | — | — | — | — | — | R | — | M | N | — | — | A | — | G | F |
| L13-1-42 | M | — | — | — | — | K | — | Y | — | — | — | — | — | — | K | — | M | N | — | — | A | — | G | F |
| L13-1-43 | M | — | — | — | — | A | — | Y | — | — | — | — | — | — | R | — | M | N | — | — | A | — | G | F |
| L13-2-18 | M | — | F | — | — | A | — | Y | — | — | — | — | — | — | K | — | M | N | R | — | A | — | G | F |
| L13-2-23 | M | — | F | — | — | A | — | Y | — | — | — | — | — | — | K | — | M | N | — | — | A | — | G | F |
| L13-2-24 | M | — | — | — | — | K | — | Y | L | — | — | — | — | — | — | — | M | N | — | — | C | — | G | F |
| L15-1 | M | — | — | — | — | Q | V | N | L | — | — | — | — | — | W | — | M | N | — | — | C | — | G | F |
| L15-14 | M | — | — | — | — | R | I | Y | L | — | — | — | — | — | K | — | M | N | — | — | C | — | G | F |
| L15-20 | M | — | — | — | P | K | I | Y | L | — | — | — | — | — | R | — | M | N | — | — | C | — | G | F |
| L15-35 | M | — | — | — | — | T | — | Y | L | — | — | — | — | N | W | — | M | N | — | — | C | — | G | F |
| L15-36 | M | — | — | G | — | K | — | Y | L | — | — | — | — | — | W | — | M | N | — | — | C | — | G | F |
| L15-41 | M | — | — | — | — | K | — | Y | L | — | — | — | — | — | K | — | M | I | — | — | C | — | G | F |

| | Sequence Position/Residue Substitution | | | | | | | | | | | | | | | | | | | | | | |
|---|---|---|---|---|---|---|---|---|---|---|---|---|---|---|---|---|---|---|---|---|---|---|---|
| Clone | 108 | 113 | 116 | 118 | 121 | 129 | 134 | 135 | 139 | 140 | 144 | 145 | 147 | 148 | 150 | 151 | 153 | 170 | 174 | 177 | 184 | 195 | 203 |
| TetR (B) | K | L | Q | A | C | N | L | S | H | F | C | V | E | D | E | H | V | L | I | F | P | C | C |
| L10-A04 | Q | A | S | — | — | — | M | Q | I | Y | — | — | L | — | — | L | — | V | L | K | — | A | A |
| L10-A05 | Q | A | S | — | — | — | M | Q | I | Y | — | — | L | — | — | L | — | V | L | K | — | S | A |
| L10-A06 | Q | A | S | — | — | — | M | Q | I | Y | — | — | L | — | — | L | — | V | L | K | — | A | S |
| L10-A09 | Q | A | S | — | — | — | M | Q | I | Y | — | — | L | — | — | L | — | V | L | K | — | — | A |
| L10-A11 | Q | A | S | — | T | — | M | Q | I | Y | — | — | L | — | — | L | — | V | L | K | L | R | — |
| L10-B02 | Q | A | S | — | — | — | M | Q | I | Y | — | — | L | — | — | L | — | V | L | K | — | S | — |
| L10-B03 | Q | A | S | — | T | — | M | Q | I | Y | — | — | L | — | — | L | — | V | L | K | — | A | A |
| L10-B06 | Q | A | S | — | T | — | M | Q | I | Y | — | A | L | — | — | L | — | V | L | K | — | S | R |
| L10-B07 | Q | A | R | — | T | — | W | Q | I | Y | — | — | L | — | — | L | — | V | L | K | — | G | S |
| L10-B08 | Q | A | S | — | T | — | M | Q | I | Y | — | — | L | N | — | L | — | V | L | K | — | A | A |
| L10-C02 | Q | A | S | — | — | — | M | Q | I | Y | S | A | L | — | — | L | — | V | L | K | — | R | — |
| L10-C06 | Q | A | S | — | T | — | M | Q | I | Y | — | — | L | — | — | L | — | V | V | K | — | A | — |
| L12-1-10 | R | A | R | — | T | Q | W | Q | I | Y | — | — | L | — | — | L | — | V | W | K | — | S | A |
| L12-1-11 | Q | A | R | — | T | — | W | Q | I | Y | — | — | L | — | — | L | — | V | W | K | — | S | A |
| L12-1-21 | Q | A | H | — | T | — | W | Q | I | Y | — | — | L | — | Q | L | — | V | W | K | — | S | A |
| L12-2-13 | Q | A | S | — | T | Q | W | Q | I | Y | — | — | L | — | — | L | F | V | V | K | — | S | A |
| L12-2-23 | R | A | R | — | T | — | W | Q | I | Y | — | — | L | — | — | L | — | V | W | K | — | S | A |
| L12-2-27 | Q | A | R | — | T | Q | W | Q | I | Y | — | — | L | — | — | L | — | V | W | K | — | S | A |
| L12-2-48 | Q | A | R | — | T | — | W | Q | I | Y | — | — | L | — | — | L | — | V | L | K | — | S | A |
| L13-1-9 | Q | M | S | — | T | — | F | Q | I | Y | — | — | L | — | — | L | — | V | Y | K | — | — | A |
| L13-1-10 | Q | A | S | — | T | — | F | Q | I | Y | — | — | L | — | — | L | — | V | — | H | — | S | — |
| L13-1-16 | Q | M | S | — | T | — | M | Q | I | Y | — | — | L | — | — | L | — | V | Y | K | — | — | A |
| L13-1-42 | Q | M | S | — | T | — | M | Q | I | Y | — | — | L | — | — | L | — | V | Y | K | — | S | — |
| L13-1-43 | Q | M | S | — | T | — | F | Q | I | Y | — | — | L | — | — | L | — | V | Y | K | — | — | — |
| L13-2-18 | Q | A | C | — | T | — | F | Q | I | Y | — | — | L | — | — | L | — | V | — | K | — | — | — |
| L13-2-23 | Q | A | C | — | T | — | F | Q | I | Y | — | — | L | — | — | L | — | V | Y | K | — | — | — |
| L13-2-24 | Q | A | W | — | T | — | F | Q | I | Y | — | — | L | — | — | L | — | V | L | H | — | S | A |
| L15-1 | R | S | K | — | T | — | F | Q | I | Y | — | — | L | — | — | L | — | V | — | A | — | S | A |
| L15-14 | Q | Q | S | — | T | — | N | Q | I | Y | — | — | L | — | — | L | — | V | — | A | — | S | A |
| L15-20 | R | A | T | — | T | — | F | Q | I | Y | — | — | L | — | — | L | — | V | Y | A | — | S | A |
| L15-35 | Q | M | S | — | T | — | M | Q | I | Y | — | — | L | — | — | L | — | V | V | A | — | S | A |
| L15-36 | Q | M | N | D | T | — | M | Q | I | Y | R | — | L | — | — | L | — | V | F | — | — | S | A |
| L15-41 | — | A | T | — | T | — | F | Q | I | Y | — | — | L | — | — | L | — | V | F | A | — | S | A |

[0325] Various nucleotide sequences of the top hits from Libraries L10, L11, L12, L13, and L15 are set forth in SEQ ID NOS: 1193-1380. Various amino acid sequences of top hits from Libraries L10, L11, L12, L13, and L15 are set forth in SEQ ID NOS: 1381-1568.

### Example 4

### Chlorsulfuron Repressor Shuffling

### A. Second-Round Shuffling

[0326] The original library was designed to thifensulfuron, but once induction activity was established with other SU compounds having potentially better soil and in planta stability properties than the original ligand, the evolution process was re-directed towards these alternative ligands. Of particular interest were herbicides metsulfuron, sulfometuron, ethametsulfuron and chlorsulfuron. For this objective, parental clones L1-9, -22, -29 and -44 were chosen for further shuffling. Clone L1-9 has strong activity on both ethametsulfuron and chlorsulfuron; clone L1-22 has strong sulfometuron activity; clone L1-29 has moderate metsulfuron activity; and clone L1-44 has moderate activity on metsulfuron, ethametsulfuron and chlorsulfuron. (Data not shown.). No clones found in the initial screen were exceptionally reactive to metsulfuron. These four clones were also chosen due to their relatively strong repressor activity, showing low β-gal background activity without inducer. Strong repressor activity is important for establishing a system which is both highly sensitive to the presence of inducer, and tightly off in the absence of inducer.

[0327] Based on the sequence information from parental clones L1-9, -22, -29 and -44, two second round libraries were designed, constructed and screened. The first library, L2, consisted of a ‘family’ shuffle whereby the amino acid diversity between the selected parental clones was varied using synthetic assembly of oligonucleotides to find clones improved in responsiveness to any of the four new target ligands. A summary of the diversity used and the resulting hit sequences for library L2 is shown in Table 10.

TABLE 10

| | Amino acid residue position | | | | | | | | | | | |
|---|---|---|---|---|---|---|---|---|---|---|---|---|
| Clone | 60 | 64 | 82 | 86 | 100 | 104 | 105 | 113 | 116 | 134 | 135 | 138 |
| wt | L | H | N | F | H | R | P | L | Q | L | S | G |
| Parents | | | | | | | | | | | | |
| L1-9 | — | A | — | M | C | G | F | A | S | M | Q | C |
| L1-22 | M | — | T | Y | C | A | I | K | N | R | Q | R |
| L1-29 | M | Q | T | M | W | — | W | P | M | W | — | C |
| L1-44 | — | A | — | Y | Y | A | V | A | — | V | K | A |
| Hits | | | | | | | | | | | | |
| L2-2 | — | Q | — | M | C | — | F | K | — | V | — | R |
| L2-9 | M | Q | — | M | Y | — | W | A | — | W | — | A |
| L2-10 | — | A | — | M | W | G | W | K | M | M | — | R |
| L2-13 | — | Q | — | M | C | — | W | A | — | W | Q | R |
| L2-14 | M | A | — | M | C | — | W | A | M | V | — | R |
| L2-18 | M | Q | T | M | W | — | W | A | — | M | — | R |
| L1-45 | A | Q | — | W | W | G | L | P | V | T | Q | R |
| Un- | ran- | ran- | ran- | ran- | W > C, | R >> G, | W > V > | ran- | ran- | ran- | S >> Q, | A >> C, |
| selected | dom | dom | dom | dom | Y | A | I, F | dom | dom | dom | K | R |
| frequency | | | | | | | | | | | | |

| | Amino acid residue position | | | | | | | Inducer |
|---|---|---|---|---|---|---|---|---|
| Clone | 139 | 147 | 151 | 164 | 174 | 177 | 203 | preference |
| wt | H | E | H | D | I | F | C | atc |
| Parents | | | | | | | | |
| L1-9 | I | L | L | — | L | K | — | 4, 9 (weak) |
| L1-22 | V | F | M | — | S | L | S | 3 |
| L1-29 | N | S | R | — | W | S | — | 9 (weak) |
| L1-44 | G | W | S | A | V | A | — | 9 (weak) |
| Hits | | | | | | | | |
| L2-2 | I | W | M | — | W | L | — | 4 (inverse) |
| L2-9 | I | W | S | — | S | K | — | 9 (leaky) |
| L2-10 | I | L | L | — | W | K | — | 4 (leaky) |
| L2-13 | I | S | M | — | V | K | — | 9 |
| L2-14 | V | F | S | A | L | K | — | 9 |
| L2-18 | N | F | L | A | W | K | — | 9 |
| L1-45 | — | G | R | — | A | L | — | 3, 4 |
| Unselected | G, N > | random | random | random | random | random | C >> S | |
| frequency | V > I | | | | | | | |

[0328] The oligonucleotides used to construct the library are shown in Table 11. The L2 oligonucleotides were assembled, cloned and screened as per the protocol described for library L1 except that each ligand was tested at 2 ppm to increase the stringency of the assay, which is a 10-fold reduction from 1st round library screening concentration.

TABLE 11

| | | SEQ |
|---|---|---|
| Oligo | Sequence | ID |
| L2:01 | TATTGGCATGTAAAAAATAAGCGAGCTCTGCTCGACGC | 1569 |
| | CTTA | |
| L2:02 | GCCATTGAGATGWTGGATAGGCACCASACTCACTTTTG | 1570 |
| | CCCT | |
| L2:03 | GCCATTGAGATGWTGGATAGGCACGCAACTCACTTTTG | 1571 |
| | CCCT | |
| L2:04 | TTAGAAGGGGAAAGCTGGCAAGATTTTTTACGTAATAM | 1572 |
| | TGCT | |
| L2:05 | AAAAGTTACAGATGTGCTTTACTAAGTCATCGCGATGG | 1573 |
| | AGCA | |
| L2:06 | AAAAGTATGAGATGTGCTTTACTAAGTCATCGCGATGG | 1574 |
| | AGCA | |
| L2:07 | AAAGTATRTTTAGGTACACGCDTCACAGAAAAACAGTA | 1575 |
| | TGAA | |
| L2:08 | AAAGTATRTTTAGGTACACGCTGGACAGAAAAACAGTA | 1576 |
| | TGAA | |
| L2:09 | AAAGTATRTTTAGGTACAGSTDTCACAGAAAAACAGTA | 1577 |
| | TGAA | |
| L2:10 | AAAGTATRTTTAGGTACAGSTTGGACAGAAAAACAGTA | 1578 |
| | TGAA | |
| L2:11 | AAAGTATGGTTAGGTACACGCDTCACAGAAAAACAGTA | 1579 |
| | TGAA | |
| L2:12 | AAAGTATGGTTAGGTACACGCTGGACAGAAAAACAGTA | 1580 |
| | TGAA | |
| L2:13 | AAAGTATGGTTAGGTACAGSTDTCACAGAAAAACAGTA | 1581 |
| | TGAA | |
| L2:14 | AAAGTATGGTTAGGTACAGSTTGGACAGAAAAACAGTA | 1582 |
| | TGAA | |
| L2:15 | ACTAAAGAAAATARCTTAGCCTTTTTATGCCAACAAGG | 1583 |
| | TTTT | |
| L2:16 | ACTAAAGAAAATCAATTAGCCTTTTTATGCCAACAAGG | 1584 |
| | TTTT | |
| L2:17 | ACTAAAGAAAATATGTTAGCCTTTTTATGCCAACAAGG | 1585 |
| | TTTT | |
| L2:18 | ACTSCTGAAAATARCTTAGCCTTTTTATGCCAACAAGG | 1586 |
| | TTTT | |
| L2:19 | ACTSCTGAAAATCAATTAGCCTTTTTATGCCAACAAGG | 1587 |
| | TTTT | |
| L2:20 | ACTSCTGAAAATATGTTAGCCTTTTTATGCCAACAAGG | 1588 |
| | TTTT | |
| L2:21 | TCACTAGAGAATGCATTATATGCARTGAGTGCTGTGGC | 1589 |
| | TAWT | |
| L2:22 | TCACTAGAGAATGCATTATATGCARTGAGTGCTGTGGC | 1590 |
| | TGKT | |
| L2:23 | TCACTAGAGAATGCATTATATGCARTGAGTGCTGTGYG | 1591 |
| | CAWT | |
| L2:24 | TCACTAGAGAATGCATTATATGCARTGAGTGCTGTGYG | 1592 |
| | CGKT | |
| L2:25 | TCACTAGAGAATGCATTATATGCARTGMAAGCTGTGGC | 1593 |
| | TAWT | |
| L2:26 | TCACTAGAGAATGCATTATATGCARTGMAAGCTGTGGC | 1594 |
| | TGKT | |
| L2:27 | TCACTAGAGAATGCATTATATGCARTGMAAGCTGTGYG | 1595 |
| | CAWT | |
| L2:28 | TCACTAGAGAATGCATTATATGCARTGMAAGCTGTGYG | 1596 |
| | CGKT | |
| L2:29 | TCACTAGAGAATGCATTATATGCAWGGAGTGCTGTGGC | 1597 |
| | TAWT | |
| L2:30 | TCACTAGAGAATGCATTATATGCAWGGAGTGCTGTGGC | 1598 |
| | TGKT | |
| L2:31 | TCACTAGAGAATGCATTATATGCAWGGAGTGCTGTGYG | 1599 |
| | CAWT | |
| L2:32 | TCACTAGAGAATGCATTATATGCAWGGAGTGCTGTGYG | 1600 |
| | CGKT | |
| L2:33 | TCACTAGAGAATGCATTATATGCAWGGMAAGCTGTGGC | 1601 |
| | TAWT | |
| L2:34 | TCACTAGAGAATGCATTATATGCAWGGMAAGCTGTGGC | 1602 |
| | TGKT | |
| L2:35 | TCACTAGAGAATGCATTATATGCAWGGMAAGCTGTGYG | 1603 |
| | CAWT | |
| L2:36 | TCACTAGAGAATGCATTATATGCAWGGMAAGCTGTGYG | 1604 |
| | CGKT | |
| L2:37 | TTTACTTTAGGTTGCGTATTGTKGGATCAAGAGAGMCA | 1605 |
| | AGTC | |
| L2:38 | TTTACTTTAGGTTGCGTATTGTKGGATCAAGAGMTGCA | 1606 |
| | AGTC | |
| L2:39 | TTTACTTTAGGTTGCGTATTGTYTGATCAAGAGAGMCA | 1607 |
| | AGTC | |
| L2:40 | TTTACTTTAGGTTGCGTATTGTYTGATCAAGAGMTGCA | 1608 |
| | AGTC | |
| L2:41 | GCTAAAGAAGAAAGGGAAACACCTACTACTGMTAGTAT | 1609 |
| | GCCG | |
| L2:42 | CCATTATTACGACAAGCTAGTGAATTATTGGATCACCA | 1610 |
| | AGGT | |
| L2:43 | CCATTATTACGACAAGCTAGTGAATTAKCAGATCACCA | 1611 |
| | AGGT | |
| L2:44 | CCATTATTACGACAAGCTAGTGAATTAAAGGATCACCA | 1612 |
| | AGGT | |
| L2:45 | CCATTATTACGACAAGCTTKGGAATTATTGGATCACCA | 1613 |
| | AGGT | |
| L2:46 | CCATTATTACGACAAGCTTKGGAATTAKCAGATCACCA | 1614 |
| | AGGT | |
| L2:47 | CCATTATTACGACAAGCTTKGGAATTAAAGGATCACCA | 1615 |
| | AGGT | |
| L2:48 | CCATTATTACGACAAGCTGTAGAATTATTGGATCACCA | 1616 |
| | AGGT | |
| L2:49 | CCATTATTACGACAAGCTGTAGAATTAKCAGATCACCA | 1617 |
| | AGGT | |
| L2:50 | CCATTATTACGACAAGCTGTAGAATTAAAGGATCACCA | 1618 |
| | AGGT | |
| L2:51 | GCAGAGCCAGCCTTCTTATTCGGCCTTGAATTGATCAT | 1619 |
| | ATGC | |
| L2:52 | GGATTAGAAAAACAACTTAAATSCGAAAGTGGGTCT | 1620 |
| | TAA | |
| L2:53 | CCTATCCAWCATCTCAATGGCTAAGGCGTCGAGCAGAG | 1621 |
| | CTCG | |
| L2:54 | TTGCCAGCTTTCCCCTTCTAAAGGGCAAAAGTGAGTST | 1622 |
| | GGTG | |
| L2:55 | TTGCCAGCTTTCCCCTTCTAAAGGGCAAAAGTGAGTTG | 1623 |
| | CGTG | |
| L2:56 | TAAAGCACATCTGTAACTTTTAGCAKTATTACGTAAAA | 1624 |
| | AATC | |
| L2:57 | TAAAGCACATCTCATACTTTTAGCAKTATTACGTAAAA | 1625 |
| | AATC | |
| L2:58 | GCGTGTACCTAAAYATACTTTTGCTCCATCGCGATGAC | 1626 |
| | TTAG | |
| L2:59 | ASCTGTACCTAAAYATACTTTTGCTCCATCGCGATGAC | 1627 |
| | TTAG | |
| L2:60 | GCGTGTACCTAACCATACTTTTGCTCCATCGCGATGAC | 1628 |
| | TTAG | |
| L2:61 | ASCTGTACCTAACCATACTTTTGCTCCATCGCGATGAC | 1629 |
| | TTAG | |
| L2:62 | GGCTAAGYTATTTTCTTTAGTTTCATACTGTTTTTCTG | 1630 |
| | TGAH | |
| L2:63 | GGCTAATTGATTTTCTTTAGTTTCATACTGTTTTTCTG | 1631 |
| | TGAH | |
| L2:64 | GGCTAACATATTTTCTTTAGTTTCATACTGTTTTTCTG | 1632 |
| | TGAH | |
| L2:65 | GGCTAAGYTATTTTCAGSAGTTTCATACTGTTTTTCTG | 1633 |
| | TGAH | |
| L2:66 | GGCTAATTGATTTTCAGSAGTTTCATACTGTTTTTCTG | 1634 |
| | TGAH | |
| L2:67 | GGCTAACATATTTTCAGSAGTTTCATACTGTTTTTCTG | 1635 |
| | TGAH | |
| L2:68 | GGCTAAGYTATTTTCTTTAGTTTCATACTGTTTTTCTG | 1636 |
| | TCCA | |
| L2:69 | GGCTAATTGATTTTCTTTAGTTTCATACTGTTTTTCTG | 1637 |
| | TCCA | |
| L2:70 | GGCTAACATATTTTCTTTAGTTTCATACTGTTTTTCTG | 1638 |
| | TCCA | |
| L2:71 | GGCTAAGYTATTTTCAGSAGTTTCATACTGTTTTTCTG | 1639 |
| | TCCA | |
| L2:72 | GGCTAATTGATTTTCAGSAGTTTCATACTGTTTTTCTG | 1640 |
| | TCCA | |
| L2:73 | GGCTAACATATTTTCAGSAGTTTCATACTGTTTTTCTG | 1641 |
| | TCCA | |
| L2:74 | ATATAATGCATTCTCTAGTGAAAAACCTTGTTGGCATA | 1642 |
| | AAAA | |
| L2:75 | CAATACGCAACCTAAAGTAAAAWTAGCCACAGCACTCA | 1643 |
| | YTGC | |
| L2:76 | CAATACGCAACCTAAAGTAAAAMCAGCCACAGCACTCA | 1644 |
| | YTGC | |
| L2:77 | CAATACGCAACCTAAAGTAAAAWTGCRCACAGCACTCA | 1645 |
| | YTGC | |
| L2:78 | CAATACGCAACCTAAAGTAAAAMCGCRCACAGCACTCA | 1646 |
| | YTGC | |
| L2:79 | CAATACGCAACCTAAAGTAAAAWTAGCCACAGCTTKCA | 1647 |
| | YTGC | |
| L2:80 | CAATACGCAACCTAAAGTAAAAMCAGCCACAGCTTKCA | 1648 |
| | YTGC | |
| L2:81 | CAATACGCAACCTAAAGTAAAAWTGCRCACAGCTTKCA | 1649 |
| | YTGC | |
| L2:82 | CAATACGCAACCTAAAGTAAAAMCGCRCACAGCTTKCA | 1650 |
| | YTGC | |
| L2:83 | CAATACGCAACCTAAAGTAAAAWTAGCCACAGCACTCC | 1651 |
| | WTGC | |
| L2:84 | CAATACGCAACCTAAAGTAAAAMCAGCCACAGCACTCC | 1652 |
| | WTGC | |
| L2:85 | CAATACGCAACCTAAAGTAAAAWTGCRCACAGCACTCC | 1653 |
| | WTGC | |
| L2:86 | CAATACGCAACCTAAAGTAAAAMCGCRCACAGCACTCC | 1654 |
| | WTGC | |
| L2:87 | CAATACGCAACCTAAAGTAAAAWTAGCCACAGCTTKCC | 1655 |
| | WTGC | |
| L2:88 | CAATACGCAACCTAAAGTAAAAMCAGCCACAGCTTKCC | 1656 |
| | WTGC | |
| L2:89 | CAATACGCAACCTAAAGTAAAAWTGCRCACAGCTTKCC | 1657 |
| | WTGC | |
| L2:90 | CAATACGCAACCTAAAGTAAAAMCGCRCACAGCTTKCC | 1658 |
| | WTGC | |
| L2:91 | TGTTTCCCTTTCTTCTTTAGCGACTTGKCTCTCTTGAT | 1659 |
| | CCMA | |
| L2:92 | TGTTTCCCTTTCTTCTTTAGCGACTTGCAKCTCTTGAT | 1660 |
| | CCMA | |
| L2:93 | TGTTTCCCTTTCTTCTTTAGCGACTTGKCTCTCTTGAT | 1661 |
| | CARA | |
| L2:94 | TGTTTCCCTTTCTTCTTTAGCGACTTGCAKCTCTTGAT | 1662 |
| | CARA | |
| L2:95 | ACTAGCTTGTCGTAATAATGGCGGCATACTAKCAGTAG | 1663 |
| | TAGG | |
| L2:96 | CMAAGCTTGTCGTAATAATGGCGGCATACTAKCAGTAG | 1664 |
| | TAGG | |
| L2:97 | TACAGCTTGTCGTAATAATGGCGGCATACTAKCAGTAG | 1665 |
| | TAGG | |
| L2:98 | GAATAAGAAGGCTGGCTCTGCACCTTGGTGATCCAATA | 1666 |
| | ATTC | |
| L2:99 | GAATAAGAAGGCTGGCTCTGCACCTTGGTGATCTGMTA | 1667 |
| | ATTC | |
| L2:100 | GAATAAGAAGGCTGGCTCTGCACCTTGGTGATCCTTTA | 1668 |
| | ATTC | |
| L2:101 | TTTAAGTTGTTTTTCTAATCCGCATATGATCAATTCAA | 1669 |
| | GGCC | |
| L2:102 | GGGAACTTCGGCGCGCCTTAAGACCCACTTTCGSA | 1670 |

### A. Third Round Library Design and Screening

### Library L6: Shuffling for Enhanced Chlorsulfuron Response

[0329] Since clones L2-14 and L2-18 had the best chlorsulfuron activity profile from library L2, their amino acid diversity was used as the basis for the next round of shuffling. In addition to the diversity provided by these backbone sequences, additional residue changes thought to enhance packing of chlorsulfuron based on the 3D model predictions were included. New amino acid positions targeted were 67, 109, 112 and 173 (see, Table 12). Substitution of Gln (Q) at position 108 and Val (V) at position 170 were shown to likely be important changes in library L4 for gaining enhanced SU responsiveness and so were varied here as well. A summary of the diversity chose is shown in Table 12. The oligonucleotides designed and used to generate library 6 are shown in Table 13.

[0330] Library L6 was assembled, rescued, ligated into pVER7314, transformed into E. coli KM3 and plated out onto LB carbenicillin/kanamycin, and carbenicillin only control media as before. Library plates were then picked into 42 384-well microtiter plates (˜16,000 clones) containing 60 μl LB carbenicillin (Cb) broth per well. After overnight growth at 37° C. the cultures were stamped onto M9 assay plates containing no inducer, 0.2 ppm, and 2.0 ppm chlorsulfuron as test inducer. Following incubation at 30° C. for ˜48 hrs, putative hits responding to chlorsulfuron treatment as determined by increased blue colony color were re-arrayed into six 96-well microtiter plates and used to stamp a fresh set of M9 assay plates to confirm the above results. For a more detailed analysis of the relative induction by chlorsulfuron, digital photographs were taken of the plates after various time points of incubation at 30° C. and colony color intensity measured using the digital image analysis freeware program ImageJ (Rasband, US National Institutes of Health, Bethesda, Md., USA, rsb.info.nih.gov/ij/, 1997-2007). Using these results enabled ranking of clones in multiplex format by background activity (no inducer), activation with low or high level inducer application (blue color with inducer), and fold activation (activation divided by background). Activation studies using 0.2 μg/ml chlorsulfuron as inducer for the top set of clones shows an approximately 3 fold improvement in activation while obtaining lower un-induced levels of expression (Data not shown.) In addition to this analysis, DNA sequence information for most clones (490 clones) was obtained and the deduced polypeptides aligned with each other as well as with their corresponding activity information. From this analysis sequence-activity relationships were derived. (Data not shown.) Residues biased for improved activity are indicated in larger bold type. Briefly, C at position 100, and Q at positions 108 and 109 strongly correlated with activation, while R at position 138, L at position 170, and A or G at position 173 were highly preferred in clones with the lowest background activity. Though some positions were strongly biased, i.e., observed more frequently in the selected population, the entirety of introduced diversity was observed in the full hit population. This information will aid in the design of further libraries to improve responsiveness to chlorsulfuron.

TABLE 12

| | Amino acid residue position | | | | | | | | | | | | | |
|---|---|---|---|---|---|---|---|---|---|---|---|---|---|---|
| | 60 | 64 | 67 | 82 | 86 | 100 | 105 | 108 | 109 | 112 | 113 | 116 | 134 | 138 |
| | | Library Diversity | | | | | | | | | | | | |
| | | A | M | N | | C | | Q | M | S | | M | M | G |
| | | Q | Y | T | | W | | K | L | T | | Q | V | R |
| | | | F | | | | | | Q | A | | | | |
| | | | L | | | | | | H | G | | | | |
| Sequence | | | I | | | | | | | | | | | |
| Name | | | V | | | | | | | | | | | |
| wt reference | L | H | F | N | F | H | P | K | Q | T | L | Q | L | G |
| L2-14 | M | A | F | N | M | C | W | K | Q | T | A | M | V | R |
| L2-18 | M | Q | F | T | M | W | W | K | Q | T | A | Q | M | R |
| L6-1B03 | M | A | I | N | M | C | W | Q | Q | A | A | M | V | R |
| L6-2C09 | M | Q | Y | T | M | C | W | Q | L | T | A | Q | M | R |
| L6-2D07 | M | Q | F | T | M | C | W | Q | Q | T | A | M | M | R |
| L6-3H02 | M | A | Y | T | M | C | W | Q | H | S | A | M | V | R |
| L6-4D10 | M | Q | Y | N | M | C | W | K | Q | S | A | M | V | R |
| L6-5F05 | M | A | I | N | M | C | W | Q | Q | A | A | Q | V | R |
| L6-5G06 | M | Q | Y | N | M | C | W | Q | Q | T | A | Q | V | R |
| L6-5H06 | M | Q | I | N | M | C | W | K | Q | T | A | M | V | R |
| L6-5H12 | M | A | Y | N | M | C | W | K | Q | T | A | Q | M | R |
| L6-6F07 | M | A | L | T | M | C | W | Q | Q | S | A | M | M | R |
| Bias in top | | none | Y | N | | C | | Q | Q | none | | none | V | R |
| population | | | | | | | | | | | | | | |

| | Amino acid residue | | | | | | | | | | | |
|---|---|---|---|---|---|---|---|---|---|---|---|---|
| | position | | | | | | | | | | | |
| | 139 | 147 | 151 | 164 | 170 | 173 | 174 | 177 | 178 | | | |
| | Library Diversity | | | | | | | | | | | |
| | N | | S | | L | G | L | | | | | 0.2 ppm |
| Sequence | V | | L | | A | A | W | | | 0.2 ppm | Control | 48 hr/Control |
| Name | | | | | V | V | | | | 48 hr | 84 hr | 84 hr |
| wt reference | H | E | H | D | L | A | I | F | D | 5.2 | 5.3 | 1.0 |
| L2-14 | V | F | S | A | L | A | L | K | D | 11.8 | 6.6 | 1.8 |
| L2-18 | N | F | L | A | L | A | W | K | D | 5.9 | 5.7 | 1.0 |
| L6-1B03 | V | F | S | A | L | A | W | K | D | 30.0 | 6.6 | 4.6 |
| L6-2C09 | V | F | L | A | L | A | W | K | D | 13.6 | 5.2 | 2.6 |
| L6-2D07 | V | F | S | A | V | A | W | K | D | 20.0 | 5.8 | 3.4 |
| L6-3H02 | V | F | S | A | V | A | W | K | V | 15.8 | 5.6 | 2.8 |
| L6-4D10 | V | F | S | A | L | A | W | K | D | 18.4 | 5.0 | 3.7 |
| L6-5F05 | V | F | L | A | L | A | W | K | D | 22.0 | 5.4 | 4.1 |
| L6-5G06 | V | F | L | A | L | G | W | K | D | 34.4 | 7.0 | 4.9 |
| L6-5H06 | V | F | L | A | V | A | W | K | D | 13.7 | 5.1 | 2.7 |
| L6-5H12 | V | F | L | A | V | A | W | K | D | 23.7 | 5.7 | 4.2 |
| L6-6F07 | V | F | S | A | L | A | W | K | D | 11.6 | 5.1 | 2.3 |
| Bias in top | V | | none | | L | A/G | W | | D | | | |
| population | | | | | | | | | | | | |

TABLE 13

| | | SEQ |
|---|---|---|
| Oligo | Sequence | ID |
| L6:1 | TATTGGCATGTAAAAAATAAGCGAGCTCTGCTCGACG | 1671 |
| | CCTTA | |
| L6:2 | GCAGAGCCAGCCTTCTTATTCGGCCTTGAATTGATCA | 1672 |
| | TATGC | |
| L6:3 | ATATAATGCATTCTCTAGTGAAAAACCTTGTTGGCAT | 1673 |
| | AAAAA | |
| L6:4 | TTTAAGTTGTTTTTCTAATCCGCATATGATCAATTCA | 1674 |
| | AGGCC | |
| L6:5 | TTAGAAGGGGAAAGCTGGCAAGATTTTTTACGTAATA | 1675 |
| | MTGCT | |
| L6:6 | TAAAGCACATCTCATACTTTTAGCAKTATTACGTAAA | 1676 |
| | AAATC | |
| L6:7 | TTGCCAGCTTTCCCCTTCTAAAGGGCAMAHGTGAGTT | 1677 |
| | GCGTG | |
| L6:8 | TTGCCAGCTTTCCCCTTCTAAAGGGCAATAGTGAGTT | 1678 |
| | GCGTG | |
| L6:9 | GAATAAGAAGGCTGGCTCTGCACCTTGGTGATCCTTT | 1679 |
| | AATTC | |
| L6:10 | GCCATTGAGATGATGGATAGGCACGCAACTCACTATT | 1680 |
| | GCCCT | |
| L6:11 | RSTGCTGAAAATATGTTAGCCTTTTTATGCCAACAAG | 1681 |
| | GTTTT | |
| L6:12 | TTTACTTTAGGTTGCGTATTGTTTGATCAAGAGCTCC | 1682 |
| | AAGTC | |
| L6:13 | TGTTTCCCTTTCTTCTTTAGCGACTTGGAGCTCTTGA | 1683 |
| | TCAAA | |
| L6:14 | GCCATTGAGATGATGGATAGGCACGCAACTCACDTKT | 1684 |
| | GCCCT | |
| L6:15 | GCCATTGAGATGATGGATAGGCACCAAACTCACDTKT | 1685 |
| | GCCCT | |
| L6:16 | GCCATTGAGATGATGGATAGGCACCAAACTCACTATT | 1686 |
| | GCCCT | |
| L6:17 | AAAAGTATGAGATGTGCTTTACTAAGCCATCGCGATG | 1687 |
| | GAGCA | |
| L6:18 | AAAGTATGKTTAGGTACACGCTGGACAGAAMAACAWT | 1688 |
| | ATGAA | |
| L6:19 | AAAGTATGKTTAGGTACACGCTGGACAGAAMAAWTGT | 1689 |
| | ATGAA | |
| L6:20 | RSTGCTGAAAATCAATTAGCCTTTTTATGCCAACAAG | 1690 |
| | GTTTT | |
| L6:21 | TCACTAGAGAATGCATTATATGCARTGAGTGCGTGGR | 1691 |
| | GGGTG | |
| L6:22 | TCACTAGAGAATGCATTATATGCARTGAGTGCGTGGR | 1692 |
| | GGAAC | |
| L6:23 | TTTACTTTAGGTTGCGTATTGTTTGATCAAGAGAGCC | 1693 |
| | AAGTC | |
| L6:24 | GCTAAAGAAGAAAGGGAAACACCTACTACTGCTAGTA | 1694 |
| | TGCCG | |
| L6:25 | CCATTAKTGCGACAAGBTTKGGAATTAAAGGATCACC | 1695 |
| | AAGGT | |
| L6:26 | CCATTAGCCCGACAAGBTTKGGAATTAAAGGATCACC | 1696 |
| | AAGGT | |
| L6:27 | GGATTAGAAAAACAACTTAAATGCGAAAGTGGGTCTT | 1697 |
| | AA | |
| L6:28 | CCTATCCATCATCTCAATGGCTAAGGCGTCGAGCAGA | 1698 |
| | GCTCG | |
| L6:29 | TTGCCAGCTTTCCCCTTCTAAAGGGCAMAHGTGAGTT | 1699 |
| | TGGTG | |
| L6:30 | TTGCCAGCTTTCCCCTTCTAAAGGGCAATAGTGAGTT | 1700 |
| | TGGTG | |
| L6:31 | GCGTGTACCTAAMCATACTTTTGCTCCATCGCGATGG | 1701 |
| | CTTAG | |
| L6:32 | GGCTAACATATTTTCAGCASYTTCATAWTGTTKTTCT | 1702 |
| | GTCCA | |
| L6:33 | GGCTAATTGATTTTCAGCASYTTCATAWTGTTKTTCT | 1703 |
| | GTCCA | |
| L6:34 | GGCTAACATATTTTCAGCASYTTCATACAWTTKTTCT | 1704 |
| | GTCCA | |
| L6:35 | GGCTAATTGATTTTCAGCASYTTCATACAWTTKTTCT | 1705 |
| | GTCCA | |
| L6:36 | CAATACGCAACCTAAAGTAAACACCCYCACAGCACTC | 1706 |
| | AYTGC | |
| L6:37 | CAATACGCAACCTAAAGTAAAGTTCCYCACAGCACTC | 1707 |
| | AYTGC | |
| L6:38 | TGTTTCCCTTTCTTCTTTAGCGACTTGGCTCTCTTGA | 1708 |
| | TCAAA | |
| L6:39 | CMAAVCTTGTCGCAMTAATGGCGGCATACTAGCAGTA | 1709 |
| | GTAGG | |
| L6:40 | CMAAVCTTGTCGGGCTAATGGCGGCATACTAGCAGTA | 1710 |
| | GTAGG | |
| L6:41 | GGGAACTTCGGCGCGCCTTAAGACCCACTTTCGCA | 1711 |

### B. Fourth Round Shuffling

[0331] Library L8 Construction and Screening.

[0332] Fourth round shuffling incorporated the best diversity from Rd3 shuffling (BB1860) as well as computational diversity (Table 14). The fully synthetic library was constructed from oligonucleotides shown in Tables 15A and 15B. As diversity was very high the library oligo mix was spiked into the parental hit variant oligo mix (5, 10, and 25% mixes) to titer down the number of residue changes per clone. In addition, to varying residues for Cs activity, seven residues (C68, C86, C88, C121, C144, C195, and C203) were varied with TetR family phylogenetic substitutions in an attempt to reduce the number of cysteine residues in the repressor. The PCR assembled libraries were cloned SacI/AscI into pVER7334. This plasmid encodes P_{BAD} promoter controlled expression of a plant optimized TetR DNA binding domain fused to the wt ligand binding domain of TetR(B) encoded by native Tn10 sequence on a SacI to AscI fragment. Approximately 15,000 clones were screened for blue colony color on the M9 XgaI assay plates+/−200 ppb Chlorsulfuron (Cs). Clones were ranked by ratio of color with inducer after 24 hrs incubation over colony color without inducer for 48 hrs of incubation. The sequence trend in the overall larger population of hits (first re-array) was that L55, R104, W105 and L170 were maintained while the C144A substitution was highly preferred. Sequence trends within the hit population were then noted with respect to repression, induction and fold induction (which corrects for leakiness). For repression C68L and C144A are favored in the highly repressed population: 57% and 93% in the top 40 repressed clones vs. 35% and 66% for the remaining 209 clones, respectively. the sequence analysis reveals that substitutions V134L and S135 to E, D, T, or Q were overrepresented. A sequence alignment of the top 20 clones is shown in Table 16.

TABLE 14
Library diversity summary for fourth, fifth and sixth round Chlorsulfuron
repressor shuffling.

| Sequence | TetR(B) | | | |
|---|---|---|---|---|
| position | Sequence | L8 | CsL3 | CsL4.2 |
| 55 | L | M [symbol] | — | — |
| 60 | L | ML | HMN | [symbol] M |
| 64 | H | QILV (SEQ ID | G [symbol] S | G [symbol] |
| | | NO: 2129) | | |
| 67 | F | Y | | — |
| 68 | C | LSC | L | L |
| 78 | F | — | — | [symbol] Y |
| 82 | N | NLIV (SEQ ID | Y [symbol] | FY |
| | | NO: 2130) | | |
| 86 | F | WFYILMC (SEQ | [symbol] S | M |
| | | ID NO: 2131) | | |
| 88 | C | RNC | R | CLR |
| 100 | H | WMVC (SEQ ID | AS | AS |
| | | NO: 2132) | | |
| 104 | R | A [symbol] G | R | R |
| 105 | P | L [symbol] FY (SEQ ID | W | W |
| | | NO: 2133) | | |
| 108 | K | Q | — | — |
| 112 | T | ST | — | — |
| 113 | L | AV | [symbol] G | A |
| 116 | Q | M | L [symbol] | M |
| 117 | L | ML | — | — |
| 121 | C | TC | T | T |
| 131 | L | ML | — | — |
| 134 | L | IV [symbol] | LTV | T |
| 135 | S | AC [symbol] K [symbol] RS [symbol] | DG [symbol] | DS |
| | | (SEQ ID NO: 2134) | | |
| 137 | V | AV | — | — |
| 138 | G | R | H [symbol] | R |
| 139 | H | IV | IV | V |
| 144 | C | W [symbol] C | A | A |
| 147 | E | LGKCRFWV | [symbol] V | [symbol] Q |
| | | (SEQ ID | | |
| | | NO: 2135) | | |
| 151 | H | S | GQS | G [symbol] |
| 155 | K | — | — | KN |
| 163 | T | — | — | PT |
| 165 | S | — | — | RS |
| 170 | L | I [symbol] | L | — |
| 173 | A | — | — | — |
| 174 | I | W | W | W |
| 177 | F | QK | K | K |
| 178 | D | — | — | DE [symbol] |
| 195 | C | SRAC (SEQ ID | A | A |
| | | NO: 2128) | | |
| 203 | C | SRAC (SEQ ID | R | R |
| | | NO: 2128) | | |

TABLE 15A
Library L8 assembly oligonucleotides

| Oligo | SEQ ID NO | Sequence | Group |
|---|---|---|---|
| L8:1 | 1712 | CACACAGGAATCCATGGCCAGACTCGACAAGAGCAAGGTG | 1 |
| L8:2 | 1713 | ATCAACAGCGCACTGGAGCTGCTGAACGAGGTCGGAATCGAA | 2 |
| L8:3 | 1714 | GGCCTCACAACCCGTAAACTCGCCCAGAAGCTCGGGGTAGAG | 3 |
| L8:4 | 1715 | CAGCCTACATTGTATTGGCACGTCAAGAACAAGCGAGCTCTG | 4 |
| L8:5 | 1716 | CTAGACGCCWTGGCCATTGAGATGWTGGATAGGCACCAWACC | 5 |
| L8:6 | 1717 | CTAGACGCCWTGGCCATTGAGATGWTGGATAGGCACVTTACC | |
| L8:7 | 1718 | CACTACTGCCCTTTGGAAGGGGAAAGCTGGCAAGACTTCTTG | 6 |
| L8:8 | 1719 | AGGAACAACGCTAAGAGCWTSAGATGTGCTTTGCTCAGTCAC | 7 |
| L8:9 | 1720 | AGGAACAACGCTAAGAGCTGGAGATGTGCTTTGCTCAGTCAC | |
| L8:10 | 1721 | AGGAACAACGCTAAGAGCTACAGATGTGCTTTGCTCAGTCAC | |
| L8:11 | 1722 | AGGAACVTTGCTAAGAGCWTSAGATGTGCTTTGCTCAGTCAC | |
| L8:12 | 1723 | AGGAACVTTGCTAAGAGCTGGAGATGTGCTTTGCTCAGTCAC | |
| L8:13 | 1724 | AGGAACVTTGCTAAGAGCTACAGATGTGCTTTGCTCAGTCAC | 8 |
| L8:14 | 1725 | CGTGATGGAGCCAAGGTCTGSCTAGGTACAGCGTKGACGGAG | |
| L8:15 | 1726 | CGTGATGGAGCCAAGGTCTGSCTAGGTACAGCGTWCACGGAG | |
| L8:16 | 1727 | CGTGATGGAGCCAAGGTCTGSCTAGGTACASGGTKGACGGAG | |
| L8:17 | 1728 | CGTGATGGAGCCAAGGTCTGSCTAGGTACASGGTWCACGGAG | |
| L8:18 | 1729 | CGTGATGGAGCCAAGGTCRTGCTAGGTACAGCGTKGACGGAG | |
| L8:19 | 1730 | CGTGATGGAGCCAAGGTCRTGCTAGGTACAGCGTWCACGGAG | |
| L8:20 | 1731 | CGTGATGGAGCCAAGGTCRTGCTAGGTACASGGTKGACGGAG | |
| L8:21 | 1732 | CGTGATGGAGCCAAGGTCRTGCTAGGTACASGGTWCACGGAG | |
| L8:22 | 1733 | CAACAGTATGAAWCTGYGGAGAACATGWTGGCCTTCCTGTGC | 9 |
| L8:23 | 1734 | CAACAAGGTTTCTCCCTTGAGAATGCCWTGTACGCAVTCDCG | 10 |
| L8:24 | 1735 | CAACAAGGTTTCTCCCTTGAGAATGCCWTGTACGCAVTCMAG | |
| L8:25 | 1736 | CAACAAGGTTTCTCCCTTGAGAATGCCWTGTACGCAVTCYGC | |
| L8:26 | 1737 | CAACAAGGTTTCTCCCTTGAGAATGCCWTGTACGCAVTCGAM | |
| L8:27 | 1738 | GCTGYGCGGRTTTTCACTCTGGGTTGCGTATTGBKGGATCAA | 11 |
| L8:28 | 1739 | GCTGYGCGGRTTTTCACTCTGGGTTGCGTATTGAAGGATCAA | |
| L8:29 | 1740 | GCTGYGCGGRTTTTCACTCTGGGTTGCGTATTGTKTGATCAA | |
| L8:30 | 1741 | GAGTCCCAAGTCGCTAAGGAGGAGAGGGAAACACCTACTACT | 12 |
| L8:31 | 1742 | GATAGTATGCCGCCACTGMTTCGACAAGCTTGGGAACTCMAA | 13 |
| L8:32 | 1743 | GATCACCAAGGTGCAGAGCCAGCCTTCCTGTTCGGCCTTGAA | 14 |
| L8:33 | 1744 | TTGATCATATGCGGATTGGAGAAGCAGCTGAAGTGTGAAAGT | 15 |
| L8:34 | 1745 | GGGTCTTAAGGCGCGCCGAAGTTCCC | 16 |
| L8:35 | 1746 | CAGCTCCAGTGCGCTGTTGATCACCTTGCTCTTGTCGAGTCT | 17 |
| L8:36 | 1747 | GAGTTTACGGGTTGTGAGGCCTTCGATTCCGACCTCGTTCAG | 18 |
| L8:37 | 1748 | GTGCCAATACAATGTAGGCTGCTCTACCCCGAGCTTCTGGGC | 19 |
| L8:38 | 1749 | CTCAATGGCCAWGGCGTCTAGCAGAGCTCGCTTGTTCTTGAC | 20 |
| L8:39 | 1750 | CCCTTCCAAAGGGCAGTAGTGGGTWTGGTGCCTATCCAWCAT | 21 |
| L8:40 | 1751 | CCCTTCCAAAGGGCAGTAGTGGGTAABGTGCCTATCCAWCAT | |
| L8:41 | 1752 | SAWGCTCTTAGCGTTGTTCCTCAAGAAGTCTTGCCAGCTTTC | 22 |
| L8:42 | 1753 | CCAGCTCTTAGCGTTGTTCCTCAAGAAGTCTTGCCAGCTTTC | |
| L8:43 | 1754 | GTAGCTCTTAGCGTTGTTCCTCAAGAAGTCTTGCCAGCTTTC | |
| L8:44 | 1755 | SAWGCTCTTAGCAABGTTCCTCAAGAAGTCTTGCCAGCTTTC | |
| L8:45 | 1756 | CCAGCTCTTAGCAABGTTCCTCAAGAAGTCTTGCCAGCTTTC | |
| L8:46 | 1757 | GTAGCTCTTAGCAABGTTCCTCAAGAAGTCTTGCCAGCTTTC | |
| L8:47 | 1758 | SCAGACCTTGGCTCCATCACGGTGACTGAGCAAAGCACATCT | 23 |
| L8:48 | 1759 | CAYGACCTTGGCTCCATCACGGTGACTGAGCAAAGCACATCT | |
| L8:49 | 1760 | CTCCRCAGWTTCATACTGTTGCTCCGTCMACGCTGTACCTAG | 24 |
| L8:50 | 1761 | CTCCRCAGWTTCATACTGTTGCTCCGTGWACGCTGTACCTAG | |
| L8:51 | 1762 | CTCCRCAGWTTCATACTGTTGCTCCGTCMACCSTGTACCTAG | |
| L8:52 | 1763 | CTCCRCAGWTTCATACTGTTGCTCCGTGWACCSTGTACCTAG | |
| L8:53 | 1764 | CTCAAGGGAGAAACCTTGTTGGCACAGGAAGGCCAWCATGTT | 25 |
| L8:54 | 1765 | CAGAGTGAAAAYCCGCRCAGCCGHGABTGCGTACAWGGCATT | 26 |
| L8:55 | 1766 | CAGAGTGAAAAYCCGCRCAGCCTKGABTGCGTACAWGGCATT | |
| L8:56 | 1767 | CAGAGTGAAAAYCCGCRCAGCGCRGABTGCGTACAWGGCATT | |
| L8:57 | 1768 | CAGAGTGAAAAYCCGCRCAGCKTCGABTGCGTACAWGGCATT | |
| L8:58 | 1769 | CTCCTTAGCGACTTGGGACTCTTGATCCMVCAATACGCAACC | 27 |
| L8:59 | 1770 | CTCCTTAGCGACTTGGGACTCTTGATCCTTCAATACGCAACC | |
| L8:60 | 1771 | CTCCTTAGCGACTTGGGACTCTTGATCAMACAATACGCAACC | |
| L8:61 | 1772 | AAKCAGTGGCGGCATACTATCAGTAGTAGGTGTTTCCCTCTC | 28 |
| L8:62 | 1773 | TGGCTCTGCACCTTGGTGATCTTKGAGTTCCCAAGCTTGTCG | 29 |
| L8:63 | 1774 | CTCCAATCCGCATATGATCAATTCAAGGCCGAACAGGAAGGC | 30 |
| L8:64 | 1775 | CTTCGGCGCGCCTTAAGACCCACTTTCACACTTCAGCTGCTT | 31 |

TABLE 15B
Oligonucleotide mixes encoding parent clone for library L8.

| | SEQ ID | | |
|---|---|---|---|
| Oligo | NO | Oligo Sequence | Group |
| L6-4010:01 | 1776 | CAGCCTACATTGTATTGGCACGTCAAGAACAAGCGAGCTCTG | 4 |
| L6-4010:02 | 1777 | CTAGACGCCTTGGCCATTGAGATGATGGATAGGCACCAAACC | 5 |
| L6-4010:03 | 1778 | CACTACTYGCCTTTGGAAGGGGAAAGCTGGCAAGACTTCTTG | 6 |
| L6-4010:04 | 1779 | AGGAACAACGCTAAGAGCTGCAGACGTGCTTTGCTCAGTCAC | 7 |
| L6-4010:05 | 1780 | AGGAACAACGCTAAGAGCTGCAGAAATGCTTTGCTCAGTCAC | |
| L6-4010:06 | 1781 | CGTGATGGAGCCAAGGTCTGCCTAGGTACACGGTGGACGGAG | 8 |
| L6-4D10:07 | 1782 | CAACAGTATGAATCTGCGGAGAACATGTTGGCCTTCCTGACC | 9 |
| L6-4010:08 | 1783 | CAACAAGGTTTCTCCCTTGAGAATGCCTTGTACGCAGTCTCC | 10 |
| L6-4010:09 | 1784 | GCTGTGCGGGTTTTCACTCTGGGTTGGGTATTGTTCGATCAA | 11 |
| L6-4010:10 | 1785 | GCTGTGCGGGTTTTCACTCTGGGTGCCGTATTGTTCGATCAA | |
| L6-4010:11 | 1786 | GAGTCCCAAGTCGCTAAGGAGGAGAGGGAAACACCTACTACT | 12 |
| L6-4010:12 | 1787 | GATAGTATGCCGCCACTGCTTCGACAAGCTTGGGAACTCAAA | 13 |
| L6-4010:13 | 1788 | GATCACCAAGGTGCAGAGCCAGCCTTCCTGTTCGGCCTTGAA | 14 |
| L6-4D10:14 | 1789 | TTGATCATAKCCGGATTGGAGAAGCAGCTGAAGKCAGAAAGT | 15 |
| L6-4010:15 | 1790 | TTGATCATAKCCGGATTGGAGAAGCAGCTGAAGAGAGAAAGT | |
| L6-4010:16 | 1791 | TTGATCATACGCGGATTGGAGAAGCAGCTGAAGKCAGAAAGT | |
| L6-4010:17 | 1792 | TTGATCATACGCGGATTGGAGAAGCAGCTGAAGAGAGAAAGT | |
| L6-4010:18 | 1793 | GGGTCTTAATGATAGCTGCAGAAGGTACCTTGGCGCGCC | 16 |
| L6-4010:19 | 1794 | CTCAATGGCCAAGGCGTCTAGCAGAGCTCGCTTGTTCTTGAC | 20 |
| L6-4010:20 | 1795 | CCCTTCCAAAGGCRAGTAGTGGGTTTGGTGCCTATCCATCAT | 21 |
| L6-4010:21 | 1796 | GCAGCTCTTAGCGTTGTTCCTCAAGAAGTCTTGCCAGCTTTC | 22 |
| L6-4010:22 | 1797 | GCAGACCTTGGCTCCATCACGGTGACTGAGCAAAGCACGTCT | 23 |
| L6-4010:23 | 1798 | GCAGACCTTGGCTCCATCACGGTGACTGAGCAAAGCATTTCT | |
| L6-4010:24 | 1799 | CTCCGCAGATTCATACTGTTGCTCCGTCCACCGTGTACCTAG | 24 |
| L6-4010:25 | 1800 | CTCAAGGGAGAAACCTTGTTGGGTCAGGAAGGCCAACATGTT | 25 |
| L6-4010:26 | 1801 | CAGAGTGAAAACCCGCACAGCGGAGACTGCGTACAAGGCATT | 26 |
| L6-4010:27 | 1802 | CTCCTTAGCGACTTGGGACTCTTGATCGAACAATACCCAACC | 27 |
| L6-4010:28 | 1803 | CTCCTTAGCGACTTGGGACTCTTGATCGAACAATACGGCACC | |
| L6-4010:29 | 1804 | AAGCAGTGGCGGCATACTATCAGTAGTAGGTGTTTCCCTCTC | 28 |
| L6-4010:30 | 1805 | TGGCTCTGCACCTTGGTGATCTTTGAGTTCCCAAGCTTGTCG | 29 |
| L6-4D10:31 | 1806 | CTCCAATCCGGMTATGATCAATTCAAGGCCGAACAGGAAGGC | 30 |
| L6-4010:32 | 1807 | CTCCAATCCGCGTATGATCAATTCAAGGCCGAACAGGAAGGC | |
| L6-4010:33 | 1808 | CTGCAGCTATCATTAAGACCCACTTTCTGMCTTCAGCTGCTT | 31 |
| L6-4010:34 | 1809 | CTGCAGCTATCATTAAGACCCACTTTCTCTCTTCAGCTGCTT | |

TABLE 16
Sequence alignment and relative performance of the top 20 L8 hits relative
to parent clone L6-4D10.

| | Colony Assay | | | | | | | | | | | | | | | | |
|---|---|---|---|---|---|---|---|---|---|---|---|---|---|---|---|---|---|
| | Results | | | Residue and Sequence Position | | | | | | | | | | | | | |
| Clone | IND | REP | F. IND | 60 | 64 | 67 | 68 | 86 | 88 | 90 | 100 | 105 | 108 | 112 | 113 | 116 | 121 |
| TetR | ND | ND | ND | L | H | F | — | F | — | — | H | P | — | T | L | Q | — |
| L6-4D10 | 0.2 | 0.6 | 0.4 | M | Q | Y | C | C | C | L | C | W | K | S | A | M | C |
| L8-3F09 | 5.6 | 0.6 | 9.7 | — | — | — | S | L | — | — | — | — | Q | — | — | — | T |
| L8-1A04 | 12.2 | 2.0 | 6.2 | — | — | — | L | C | N | — | — | — | Q | T | — | — | T |
| L8-3B08 | 13.0 | 2.1 | 6.1 | — | — | — | S | L | — | — | — | — | Q | — | — | — | T |
| L8-1B12 | 12.5 | 2.4 | 5.1 | — | — | — | S | W | — | — | — | — | Q | — | — | — | T |
| L8-3D03 | 5.9 | 1.2 | 4.9 | — | — | — | L | C | N | — | — | — | Q | — | — | — | T |
| L8-2F12 | 2.7 | 0.7 | 3.6 | — | — | — | S | C | N | — | — | — | Q | — | — | — | T |
| L8-3F02 | 3.4 | 1.0 | 3.5 | — | — | — | S | C | R | — | — | — | Q | — | — | — | — |
| L8-3E05 | 1.4 | 0.4 | 3.4 | — | — | — | — | L | — | — | — | — | Q | — | — | — | T |
| L8-3A05 | 0.3 | 0.1 | 3.3 | — | — | — | S | C | N | — | — | — | Q | — | — | — | T |
| L8-3A04 | 0.5 | 0.1 | 3.3 | — | — | — | S | C | R | — | — | — | Q | — | — | — | T |
| L8-1A03 | 8.6 | 2.8 | 3.1 | — | — | — | S | C | N | — | — | — | Q | — | — | — | T |
| L8-3F01 | 1.7 | 0.6 | 3.0 | — | — | — | L | C | R | — | — | — | Q | T | — | — | T |
| L8-3A07 | 0.7 | 0.2 | 2.9 | — | — | — | S | M | — | — | — | — | Q | — | — | — | T |
| L8-1A06 | 2.1 | 0.8 | 2.7 | — | — | — | S | C | R | V | — | — | Q | — | — | — | T |
| L8-2H01 | 12.9 | 4.8 | 2.7 | — | — | — | S | C | R | — | — | — | Q | — | — | — | T |
| L8-3F08 | 1.5 | 0.6 | 2.7 | — | — | — | S | C | N | — | V | — | Q | — | — | — | T |
| L8-3A06 | 0.3 | 0.1 | 2.6 | — | — | — | L | C | N | — | — | — | Q | — | — | — | T |
| L8-1E04 | 1.5 | 0.6 | 2.5 | — | — | — | L | C | N | — | — | — | Q | — | — | — | T |
| L8-1A05 | 10.8 | 4.4 | 2.5 | — | — | — | S | C | R | — | — | — | Q | — | — | — | T |
| L8-3B03 | 0.6 | 0.3 | 2.4 | — | — | — | L | C | R | — | — | — | Q | — | — | — | T |

| | Residue and Sequence Position | | | | | | | | | | | | | | |
|---|---|---|---|---|---|---|---|---|---|---|---|---|---|---|---|
| Clone | 131 | 134 | 135 | 137 | 138 | 139 | 144 | 147 | 151 | 164 | 174 | 177 | 195 | 203 | 205 |
| TetR | — | L | — | — | G | H | — | E | H | D | I | F | — | — | — |
| L6-4D10 | L | V | S | V | R | V | C | F | S | A | W | K | C | C | S |
| L8-3F09 | — | L | T | — | — | — | W | — | — | D | — | — | A | R | — |
| L8-1A04 | — | L | E | A | — | — | A | — | — | D | — | — | S | R | — |
| L8-3B08 | — | — | D | A | — | — | W | — | — | D | — | — | R | R | — |
| L8-1B12 | — | L | E | — | — | — | W | — | — | D | — | — | A | A | — |
| L8-3D03 | — | L | D | — | — | — | A | — | — | D | — | — | R | S | — |
| L8-2F12 | — | L | Q | — | — | — | W | — | — | D | — | — | R | S | — |
| L8-3F02 | — | — | — | — | — | I | A | — | — | D | — | — | A | R | — |
| L8-3E05 | — | L | Q | — | — | I | — | — | — | D | — | — | R | R | — |
| L8-3A05 | — | — | — | — | — | — | A | — | — | D | — | — | S | S | — |
| L8-3A04 | — | — | — | — | — | — | A | — | — | D | — | — | R | R | C |
| L8-1A03 | — | L | D | — | — | — | A | — | — | D | — | — | A | R | — |
| L8-3F01 | — | — | — | — | — | — | A | — | — | D | — | — | A | R | — |
| L8-3A07 | — | — | — | — | — | — | W | — | — | D | — | — | A | R | — |
| L8-1A06 | — | — | — | — | — | — | A | — | — | D | — | — | A | R | — |
| L8-2H01 | — | L | E | — | — | — | A | — | — | D | — | — | R | R | — |
| L8-3F08 | M | L | E | A | — | I | W | — | — | D | — | — | R | S | — |
| L8-3A06 | — | — | — | — | — | — | A | — | — | D | — | — | S | R | — |
| L8-1E04 | — | — | — | — | — | — | A | Y | — | D | — | — | R | A | — |
| L8-1A05 | — | — | D | — | — | — | A | — | — | D | — | — | A | A | — |
| L8-3B03 | — | — | — | — | — | — | A | — | — | D | — | — | R | S | — |

Clones ranked by blue colony color intensity thru ImageJ analysis.
IND = induction with 200 ppb Cs at 24 hrs
REP = repression measured without inducer after 48 hrs
F. IND = fold induction: induction with 200 ppb Cs at 24 hrs/repression at 48 hrs

### C. Fifth Round Chlorsulfuron Repressor Shuffling

[0333] Saturation mutagenesis of ligand binding pocket: To generate novel diversity for further rounds of shuffling residues 60, 64, 82, 86, 100, 104, 105, 113, 116, 134, 135, 138, 139, 147, 151, 174, and 177 in L8 hit L8-3F01 were subjected to NNK substitution mutagenesis with the following primers shown in Table 17.

TABLE 17
Oligonucleotides used for saturation mutagenesis of putative ligand binding
pocket residues.

| | Residue/ | | SEQ ID |
|---|---|---|---|
| Oligo | Strand | Sequence | NO |
| 3F1-60T | 60 top | CCTTGGCCATTGAGATGNNKGATAGGCACCAAACCCACTAC | 1810 |
| 3F1-60B | 60 bottom | GTAGTGGGTTTGGTGCCTATCMNNCATCTCAATGGCCAAGG | 1811 |
| 3F1-64T | 64 top | GAGATGATGGATAGGCACNNKACCCACTACTTGCCTTTG | 1812 |
| 3F1-64B | 64 bottom | CAAAGGCAAGTAGTGGGTMNNGTGCCTATCCATCATCTC | 1813 |
| 3F1-82T | 60 top | CAAGACTTCTTGAGGAACNNKGCTAAGAGCTGCAGACGTG | 1814 |
| 3F1-82B | 82 bottom | CACGTCTGCAGCTCTTAGCMNNGTTCCTCAAGAAGTCTTG | 1815 |
| 3F1-86T | 86 top | GAGGAACAACGCTAAGAGCNNKAGACGTGCTTTGCTCAGTC | 1816 |
| 3F1-86B | 86 bottom | GACTGAGCAAAGCACGTCTMNNGCTCTTAGCGTTGTTCCTC | 1817 |
| 3F1-100T | 100 top | CGTGATGGAGCCAAGGTCNNKCTAGGTACACGGTGGACG | 1818 |
| 3F1-100B | 100 bottom | CGTCCACCGTGTACCTAGMNNGACCTTGGCTCCATCACG | 1819 |
| 3F1-104T | 104 top | CAAGGTCTGCCTAGGTACANNKTGGACGGAGCAACAGTATG | 1820 |
| 3F1-104B | 104 bottom | CATACTGTTGCTCCGTCCAMNNTGTACCTAGGCAGACCTTG | 1821 |
| 3F1-105T | 105 top | GTCTGCCTAGGTACACGGNNKACGGAGCAACAGTATGAAAC | 1822 |
| 3F1-105B | 105 bottom | GTTTCATACTGTTGCTCCGTMNNCCGTGTACCTAGGCAGAC | 1823 |
| 3F1-113T | 113 top primer | GAGCAACAGTATGAAACTNNKGAGAACATGTTGGCCTTCC | 1824 |
| 3F1-113B | 113 bottom | GGAAGGCCAACATGTTCTCMNNAGTTTCATACTGTTGCTC | 1825 |
| 3F1-116T | 116 top | GTATGAAACTGCGGAGAACNNKTTGGCCTTCCTGACCCAAC | 1826 |
| 3F1-116B | 116 bottom | GTTGGGTCAGGAAGGCCAAMNNGTTCTCCGCAGTTTCATAC | 1827 |
| 3F1-134T | 134 top | GAGAATGCCTTGTACGCANNKTCCGCTGTGCGGGTTTTCAC | 1828 |
| 3F1-134B | 134 bottom | GTGAAAACCCGCACAGCGGAMNNTGCGTACAAGGCATTCTC | 1829 |
| 3F1-135T | 135 top | GAATGCCTTGTACGCAGTCNNKGCTGTGCGGGTTTTCACTC | 1830 |
| 3F1-135B | 135 bottom | GAGTGAAAACCCGCACAGCMNNGACTGCGTACAAGGCATTC | 1831 |
| 3F1-138T | 138 top | GTACGCAGTCTCCGCTGTGNNKGTTTTCACTCTGGGTGCC | 1832 |
| 3F1-138B | 138 bottom | GGCACCCAGAGTGAAAACMNNCACAGCGGAGACTGCGTAC | 1833 |
| 3F1-139T | 139 top | ACGCAGTCTCCGCTGTGCGGNNKTTCACTCTGGGTGCCGTA | 1834 |
| 3F1-139B | 139 bottom | TACGGCACCCAGAGTGAAMNNCCGCACAGCGGAGACTGCGT | 1835 |
| 3F1-147T | 147 top | CACTCTGGGTGCCGTATTGNNKGATCAAGAGTCCCAAGTC | 1836 |
| 3F1-147B | 147 bottom | GACTTGGGACTCTTGATCMNNCAATACGGCACCCAGAGTG | 1837 |
| 3F1-151T | 151 top | CGTATTGTTCGATCAAGAGNNKCAAGTCGCTAAGGAGGAGAG | 1838 |
| 3F1-151B | 151B | CTCTCCTCCTTAGCGACTTGMNNCTCTTGATCGAACAATACG | 1839 |
| 3F1-174T | 174 top | GCCACTGCTTCGACAAGCTNNKGAACTCAAAGATCACCAAG | 1840 |
| 3F1-174B | 174 bottom | CTTGGTGATCTTTGAGTTCMNNAGCTTGTCGAAGCAGTGGC | 1841 |
| 3F1-177T | 177 top | TCGACAAGCTTGGGAACTCNNKGATCACCAAGGTGCAGAGC | 1842 |
| 3F1-177B | 177 bottom | GCTCTGCACCTTGGTGATCMNNGAGTTCCCAAGCTTGTCGA | 1843 |

[0334] Mutagenesis reactions were transformed into library strain Km3 and 96 colonies tested for substitution by DNA sequence analysis. Substitutions representing each possible residue at each position were then re-arrayed in triplicate onto M9 X-gal assay plates with 0, 20 and 200 ppb Chlorsulfuron. Plates were incubated at 37° C. for 24 and 48 hrs prior to imaging. Residue substitutions were then ranked by activation (emphasis on 20 ppb Cs) and repression characteristics (emphasis on 48 hr time point). The mutation with the greatest impact on activity was substitution of residue N82 to phenylalanine or tyrosine. Tryptophan substitution also improved activity at N82 but not nearly as much as either phe or tyr. Substitutions S135D, S135E, F147Q, F147V and S151Q all dramatically increase sensitivity to Chlorsulfuron induction however partially at the expense of repressor function. All other preferred substitutions shown in Table 18 either improved repression or improved sensitivity to inducer without compromising repressor function. Certain residues were indispensible to function such as R104, W105, and W174 as substitutions were not allowed. Other residue positions such as R138 and K177 were also flagged as critical since functional substitutions were extremely limited.

TABLE 18
Summary of saturation mutagenesis results.

| | Residue targeted for mutagenesis | | | | | | | | | | | | | | | | |
|---|---|---|---|---|---|---|---|---|---|---|---|---|---|---|---|---|---|
| | M60 | Q64 | N82 | C86 | C100 | R104 | W105 | A113 | M116 | V134 | S135 | R138 | V139 | F147 | S151 | W174 | K177 |
| Top | H | D | [symbol] | G | A | [symbol] * | [symbol] * | A | L | L | D | H | I | F | G | [symbol] * | [symbol] |
| Substitutions | M | E | [symbol] | M | C | | | G | M | T | E | [symbol] | L | L | Q | | R |
| | N | G | | S | S | | | V | Q | V | G | | V | M | S | | |
| | | Q | | T | | | | | | | S | | | Q | | | |
| | | S | | | | | | | | | | | | V | | | |

Bold = highly sensitive response but slightly leaky;
Bold and italic = highly selected residues;
* = only residue that functions at the respective position

[0335] Library CsL3 construction and screening: Based on the IVM results the top performing residue substitutions were incorporated into library CsL3 (Table 14). The library was assembled with the oligonucleotides shown below in Table 19. The first and last primers in each set were used as rescue primers. To enable purification of hit proteins, a 6×His-tag between was added to the C-terminus of the ligand binding domain of each clone during the assembly and rescue process. The library was then inserted into pVER7334 SacI/AscI, transformed into E. coli assay strain Km3 and selected on LB+40 ug/ml Kanamycin and 50 ug/ml Carbenicillin. Approximately 10,000 colonies were then re-arrayed into 384-well format, and replica plated onto M9 XgaI assay medium containing 0 or 20 ppb Cs. Colony color was then assessed at 24 and 96 hrs of incubation at 37° C. Results showed that residue substitutions N82F, V134T, and F147Q were highly preferred as was the maintenance of residues Q64, A113, M116, S135, R138, and V139. Interestingly the very best hits had a random F147L substitution resulting in an additional ˜2× increase in activity over the next best clones. Also, while the C86M substitution was less frequent in the overall hit population it occurred in all top 26 clones.

TABLE 19
Oligonucleotides encoding library CsL3.

| | SEQ ID | | |
|---|---|---|---|
| Oligo | NO | Sequence | Group |
| CsL3:1 | 1844 | TGGCACGTCAAGAACAAGCGAGCTCTGCTAGACGCCTTGGCC | 1 |
| CsL3:2 | 1845 | ATTGAGATGMATGATAGGCACRGCACCCACTACTTGCCTTTG | 2 |
| CsL3:3 | 1846 | ATTGAGATGMATGATAGGCACCAGACCCACTACTTGCCTTTG | |
| CsL3:4 | 1847 | ATTGAGATGATGGATAGGCACRGCACCCACTACTTGCCTTTG | |
| CsL3:5 | 1848 | ATTGAGATGATGGATAGGCACCAGACCCACTACTTGCCTTTG | |
| CsL3:6 | 1849 | GAAGGGGAAAGCTGGCAAGACTTCTTGAGGAACTWCGCTAAG | 3 |
| CsL3:7 | 1850 | AGCTCCCGACGTGCTTTGCTCAGTCACCGTGATGGAGCCAAG | 4 |
| CsL3:8 | 1851 | AGCATGCGACGTGCTTTGCTCAGTCACCGTGATGGAGCCAAG | |
| CsL3:9 | 1852 | GTCKCGCTTGGTACACGGTGGACGGAGCAACAGTATGAAACT | 5 |
| CsL3:10 | 1853 | GSAGAGAACWTGTTGGCCTTCCTGACCCAACAAGGTTTCTCC | 6 |
| CsL3:11 | 1854 | CTTGAGAATGCCTTGTACGCAACCGRCGCTGTGCRTRTTTTC | 7 |
| CsL3:12 | 1855 | CTTGAGAATGCCTTGTACGCAACCTCAGCTGTGCRTRTTTTC | |
| CsL3:13 | 1856 | CTTGAGAATGCCTTGTACGCASTGGRCGCTGTGCRTRTTTTC | |
| CsL3:14 | 1857 | CTTGAGAATGCCTTGTACGCASTGTCAGCTGTGCRTRTTTTC | |
| CsL3:15 | 1858 | ACTCTGGGTGCCGTATTGGTGGATCAAGAGRGCCAAGTCGCT | 8 |
| CsL3:16 | 1859 | ACTCTGGGTGCCGTATTGGTGGATCAAGAGCAGCAAGTCGCT | |
| CsL3:17 | 1860 | ACTCTGGGTGCCGTATTGCAAGATCAAGAGRGCCAAGTCGCT | |
| CsL3:18 | 1861 | ACTCTGGGTGCCGTATTGCAAGATCAAGAGCAGCAAGTCGCT | |
| CsL3:19 | 1862 | AAGGAGGAGAGGGAAACACCTACTACTGATAGTATGCCGCCA | 9 |
| CsL3:20 | 1863 | CTGCTTCGACAAGCCTGGGAACTCAAAGATCACCAAGGTGCA | 10 |
| CsL3:21 | 1864 | GAGCCAGCCTTCCTGTTCGGCCTTGAATTGATCATAGCCGGA | 11 |
| CsL3:22 | 1865 | TTGGAGAAGCAGCTGAAGAGAGAAAGTGGGTCTCACCATCAC | 12 |
| CsL3:23 | 1866 | GTGCCTATCATKCATCTCAATGGCCAAGGCGTCTAGCAGAGC | 13 |
| CsL3:24 | 1867 | GTGCCTATCCATCATCTCAATGGCCAAGGCGTCTAGCAGAGC | |
| CsL3:25 | 1868 | GTCTTGCCAGCTTTCCCCTTCCAAAGGCAAGTAGTGGGTGCT | 14 |
| CsL3:26 | 1869 | GTCTTGCCAGCTTTCCCCTTCCAAAGGCAAGTAGTGGGTGCC | |
| CsL3:27 | 1870 | GTCTTGCCAGCTTTCCCCTTCCAAAGGCAAGTAGTGGGTCTG | |
| CsL3:28 | 1871 | GAGCAAAGCACGTCGGGAGCTCTTAGCGWAGTTCCTCAAGAA | 15 |
| CsL3:29 | 1872 | GAGCAAAGCACGTCGCATGCTCTTAGCGWAGTTCCTCAAGAA | |
| CsL3:30 | 1873 | CCACCGTGTACCAAGCGMGACCTTGGCTCCATCACGGTGACT | 16 |
| CsL3:31 | 1874 | GAAGGCCAACAWGTTCTCTSCAGTTTCATACTGTTGCTCCGT | 17 |
| CsL3:32 | 1875 | TGCGTACAAGGCATTCTCAAGGGAGAAACCTTGTTGGGTCAG | 18 |
| CsL3:33 | 1876 | CACCAATACGGCACCCAGAGTGAAAAYAYGCACAGCGYCGGT | 19 |
| CsL3:34 | 1877 | TTGCAATACGGCACCCAGAGTGAAAAYAYGCACAGCGYCGGT | |
| CsL3:35 | 1878 | CACCAATACGGCACCCAGAGTGAAAAYAYGCACAGCTGAGGT | |
| CsL3:36 | 1879 | TTGCAATACGGCACCCAGAGTGAAAAYAYGCACAGCTGAGGT | |
| CsL3:37 | 1880 | CACCAATACGGCACCCAGAGTGAAAAYAYGCACAGCGYCCAC | |
| CsL3:38 | 1881 | CACCAATACGGCACCCAGAGTGAAAAYAYGCACAGCGYCCAG | |
| CsL3:39 | 1882 | TTGCAATACGGCACCCAGAGTGAAAAYAYGCACAGCGYCCAC | |
| CsL3:40 | 1883 | TTGCAATACGGCACCCAGAGTGAAAAYAYGCACAGCGYCCAG | |
| CsL3:41 | 1884 | CACCAATACGGCACCCAGAGTGAAAAYAYGCACAGCTGACAC | |
| CsL3:42 | 1885 | CACCAATACGGCACCCAGAGTGAAAAYAYGCACAGCTGACAG | |
| CsL3:43 | 1886 | TTGCAATACGGCACCCAGAGTGAAAAYAYGCACAGCTGACAC | |
| CsL3:44 | 1887 | TTGCAATACGGCACCCAGAGTGAAAAYAYGCACAGCTGACAG | |
| CsL3:45 | 1888 | AGGTGTTTCCCTCTCCTCCTTAGCGACTTGGCYCTCTTGATC | 20 |
| CsL3:46 | 1889 | AGGTGTTTCCCTCTCCTCCTTAGCGACTTGCTGCTCTTGATC | |
| CsL3:47 | 1890 | TTCCCAGGCTTGTCGAAGCAGTGGCGGCATACTATCAGTAGT | 21 |
| CsL3:48 | 1891 | GCCGAACAGGAAGGCTGGCTCTGCACCTTGGTGATCTTTGAG | 22 |
| CsL3:49 | 1892 | TCTCTTCAGCTGCTTCTCCAATCCGGCTATGATCAATTCAAG | 23 |
| CsL3:50 | 1893 | CACAGGCGCGCCTTAGTGATGGTGGTGATGGTGAGACCCACTTTC | 24 |

TABLE 20
Performance of the top 20CsL3 hits and associated residue substitutions
relative to the parent clone L8-F301.

| | Colony Assay | | | | | | | | | | | | | | | | | | | | | | | | |
|---|---|---|---|---|---|---|---|---|---|---|---|---|---|---|---|---|---|---|---|---|---|---|---|---|---|
| | Results | | | Residue and Sequence Position | | | | | | | | | | | | | | | | | | | | | |
| CsL3 Hit | REP | IND | F.IND | 60 | 64 | 82 | 86 | 100 | 113 | 121 | 126 | 128 | 134 | 135 | 139 | 147 | 151 | 152 | 155 | 156 | 157 | 158 | 163 | 192 | 202 |
| L8-F301 | 0.7 | 1.6 | 2.5 | M | Q | N | C | C | A | T | S | E | V | S | V | F | S | Q | K | E | E | R | T | L | K |
| 1C12 | 0.9 | 8.8 | 9.5 | H | G | F | M | S | — | — | — | — | T | — | — | L | Q | — | — | — | — | — | — | — | * |
| 1B11 | 1.3 | 10.8 | 8.0 | — | — | F | M | A | — | — | — | — | T | — | — | L | Q | — | — | — | — | — | — | — | — |
| 1A07 | 1.5 | 8.1 | 5.4 | — | — | F | M | S | — | — | P | — | T | D | — | Q | G | — | — | — | — | — | — | — | — |
| 1B04 | 2.2 | 10.5 | 4.8 | H | — | F | M | S | — | — | — | — | T | — | — | Q | Q | — | — | — | — | — | P | — | — |
| 2E09 | 1.3 | 5.7 | 4.5 | H | — | F | M | A | G | — | — | — | T | — | — | Q | G | — | — | — | — | — | — | — | — |
| 2D11 | 0.9 | 3.9 | 4.3 | N | — | F | M | S | — | — | — | — | T | — | — | Q | — | — | — | — | — | — | — | — | — |
| 2B09 | 0.9 | 3.8 | 4.3 | — | — | Y | M | S | — | — | — | — | T | — | — | Q | G | — | N | — | — | — | — | — | — |
| 2B06 | 1.3 | 5.6 | 4.2 | H | — | F | M | S | G | — | — | — | — | D | — | Q | G | — | — | — | D | — | — | — | — |
| 2A01 | 1.4 | 5.9 | 4.2 | — | G | F | M | S | — | — | — | — | T | — | — | Q | — | — | — | — | — | — | — | — | — |
| 2D10 | 1.1 | 4.7 | 4.2 | H | — | F | M | S | — | — | — | — | T | — | — | Q | — | — | — | — | — | — | — | — | — |
| 2D02 | 1.6 | 6.3 | 3.9 | — | — | F | M | S | — | — | P | — | T | D | — | Q | G | — | — | — | — | — | — | — | — |
| 2E07 | 0.9 | 3.4 | 3.8 | — | — | Y | M | A | — | — | — | — | T | — | — | Q | G | — | — | — | — | — | — | — | — |
| 2E12 | 1.2 | 4.4 | 3.8 | — | — | Y | M | A | — | — | — | — | T | G | — | Q | — | H | — | V | — | — | — | — | — |
| 1C01 | 1.5 | 5.5 | 3.7 | — | G | Y | M | A | — | — | — | — | T | G | I | Q | — | — | — | — | — | — | — | V | — |
| 1B05 | 1.3 | 4.8 | 3.6 | — | — | Y | M | A | — | — | — | — | T | — | — | Q | G | — | — | — | — | — | — | — | — |
| 2E10 | 0.4 | 1.3 | 3.5 | H | R | Y | M | S | — | — | — | — | T | — | — | V | Q | — | — | — | — | T | — | — | — |
| 2B12 | 1.7 | 6.1 | 3.5 | — | — | F | M | S | — | — | — | — | T | — | — | Q | — | — | — | — | — | — | — | — | N |
| 2E08 | 2.2 | 7.6 | 3.4 | — | — | F | M | A | — | — | — | — | T | — | — | Q | G | — | — | — | — | — | — | — | — |
| 2E11 | 2.1 | 7.2 | 3.4 | — | — | F | M | S | — | I | — | Q | L | — | — | Q | — | — | — | — | — | — | — | — | — |
| 2D12 | 2.1 | 7.0 | 3.4 | — | S | F | M | A | G | — | — | — | T | — | — | Q | — | — | — | — | — | — | — | — | — |

IND = induction with 20 ppb CS; REP = repression in absence of inducer; F. IND = fold induction (IND/REP)

### D. Sixth Round Chlorsulfuron Repressor Shuffling

[0336] Creating novel diversity through random mutagenesis. In order to create new diversity for shuffling the top clone from CsL3 was subjected to error prone PCR mutagenesis using Mutazyme (Stratagene). The mutated PCR product encoding the CsR ligand binding domain was inserted into library expression vector pVER7334 as a SacI to AscI fragment, transformed into library strain Km3 and plated onto LB+40 ug/ml Kanamycin and 50 ug/ml Carbenecillin. Approximately 10,000 colonies were then replica plated onto M9 XgaI assay medium+/−20 ppb Cs. Putative hits were then re-arrayed and replica plated onto the same assay medium. Performance was gauged by the level of blue colony color after 24 hrs incubation on inducer (induction) and 72 hrs incubation without inducer (repression). The top hits were then subjected to liquid B-galactosidase assays for quantitative assessment (Table 21). The results reveal that modification of position D178 is important as mutation to either V or E improves activity at least two-fold. Substitutions F78Y, R88C, and S165R may also have made contributions to activity.

TABLE 21
Performance of the top CsL3-MTZ hits and associated residue substitutions
relative to the parent clone CsL3-C12 and L8-F301.

| | B-galactosidase assay | | | Residue and Sequence Position | | | | | | | | | | | | |
|---|---|---|---|---|---|---|---|---|---|---|---|---|---|---|---|---|
| Clone | IND | REP | F. IND | 60 | 64 | 78 | 82 | 86 | 88 | 100 | 134 | 147 | 151 | 165 | 178 | 202 |
| L8-3F01 | 8 | 7 | 1 | M | Q | F | N | C | R | C | V | F | S | S | D | K |
| CsL3-C12 | 218 | 17 | 13 | H | G | — | F | M | — | S | T | L | Q | — | — | * |
| CsL3-C12-MTZ-2 | 287 | 9 | 30 | H | G | — | F | M | — | S | T | L | Q | — | V | * |
| CsL3-C12-MTZ-4 | 460 | 18 | 25 | H | G | Y | F | M | — | S | T | L | Q | — | E | * |
| CsL3-C12-MTZ-3 | 347 | 21 | 16 | H | G | — | F | M | C | S | T | L | Q | R | — | * |
| CsL3-C12-MTZ-5 | 440 | 29 | 15 | H | G | — | F | M | — | S | T | L | Q | — | E | * |

IND = induction with 20 ppb CS; REP = repression in absence of inducer; F. IND = fold induction (IND/REP)

[0337] Construction and screening of library CsL4.2. Seventh round library CsL4.2 was designed based on the best diversity from CsL3 and CsL3-MTZ library screens (Table 14). The library was assembled with oligonucleotides shown below in Table 22. The first and last primers were used as rescue primers. CsL4.2 included a C-terminal 6×His-tag extension to facilitate protein purification. The library was assembled and cloned into vector pVER7334 SacI to AscI, transformed into library assay strain Km3 and plated onto LB+40 ug/ml Kanamycin and 50 ug/ml carbenecillin. Approximately 8,000 colonies were re-arrayed into 384-well format and replica plated onto M9 XgaI assay medium+/−2 ppb Cs. Putative hits were re-arrayed in 96-well format onto the same media for re-testing. Confirmed hits were then tested for induction and repression aspects in liquid culture using B-galactosidase assays. Results show that F82, L147, V178, and to a lesser extent Q151 were strongly selected for in the hit population. Although there was no preference at position 135 in the larger hit population, the top six clones all had the S135D substitution (Table 23).

TABLE 22
Library 4.2 assembly oligonucleotides.

| | SEQ ID | | |
|---|---|---|---|
| Oligo | NO | Sequence | Group |
| CsL4.2-1 | 1894 | TGGCACGTCAAGAACAAGCGAGCTCTGCTAGACGCCTTGGCC | 1 |
| CsL4.2-2 | 1895 | ATTGAGATGCATGATAGGCACGGAACCCACTACTTGCCTTTG | 2 |
| CsL4.2-3 | 1896 | ATTGAGATGCATGATAGGCACCAAACCCACTACTTGCCTTTG | |
| CsL4.2-4 | 1897 | ATTGAGATGATGGATAGGCACGGAACCCACTACTTGCCTTTG | |
| CsL4.2-5 | 1898 | ATTGAGATGATGGATAGGCACCAAACCCACTACTTGCCTTTG | |
| CsL4.2-6 | 1899 | GAAGGGGAAAGCTGGCAAGACTWTTTGAGGAACTWTGCTAAG | 3 |
| CsL4.2-7 | 1900 | AGCATGCGACKAGCTTTGCTCAGTCACCGTGATGGAGCCAAG | 4 |
| CsL4.2-8 | 1901 | AGCATGCGATGCGCTTTGCTCAGTCACCGTGATGGAGCCAAG | |
| CsL4.2-9 | 1902 | GTCKCCCTTGGTACACGGTGGACGGAGCAACAGTATGAAACT | 5 |
| CsL4.2-10 | 1903 | GCGGAGAACATGTTGGCCTTCCTGACCCAACAAGGTTTCTCC | 6 |
| CsL4.2-11 | 1904 | CTTGAGAATGCCTTGTACGCAACAGATGCTGTGCGGGTTTTC | 7 |
| CsL4.2-12 | 1905 | CTTGAGAATGCCTTGTACGCAACAAGCGCTGTGCGGGTTTTC | |
| CsL4.2-13 | 1906 | ACTCTGGGTGCCGTATTGCWGGATCAAGAGGGACAAGTCGCT | 8 |
| CsL4.2-14 | 1907 | ACTCTGGGTGCCGTATTGCWGGATCAAGAGCAACAAGTCGCT | |
| CsL4.2-15 | 1908 | AAKGAGGAGAGGGAAACACCTACTMCTGATAGWATGCCGCCA | 9 |
| CsL4.2-16 | 1909 | CTGCTTCGACAAGCCTGGGAACTCAAAGWKCACCAAGGTGCA | 10 |
| CsL4.2-17 | 1910 | GAGCCAGCCTTCCTGTTCGGCCTTGAATTGATCATAGCCGGA | 11 |
| CsL4.2-18 | 1911 | TTGGAGAAGCAGCTGAAGAGAGAAAGTGGGTCTCACCATCAC | 12 |
| CsL4.2-19 | 1912 | GTGCCTATCATGCATCTCAATGGCCAAGGCGTCTAGCAGAGC | 13 |
| CsL4.2-20 | 1913 | GTGCCTATCCATCATCTCAATGGCCAAGGCGTCTAGCAGAGC | |
| CsL4.2-21 | 1914 | GTCTTGCCAGCTTTCCCCTTCCAAAGGCAAGTAGTGGGTTCC | 14 |
| CsL4.2-22 | 1915 | GTCTTGCCAGCTTTCCCCTTCCAAAGGCAAGTAGTGGGTTTG | |
| CsL4.2-23 | 1916 | GAGCAAAGCTMGTCGCATGCTCTTAGCAWAGTTCCTCAAAWA | 15 |
| CsL4.2-24 | 1917 | GAGCAAAGCGCATCGCATGCTCTTAGCAWAGTTCCTCAAAWA | |
| CsL4.2-25 | 1918 | CCACCGTGTACCAAGGGMGACCTTGGCTCCATCACGGTGACT | 16 |
| CsL4.2-26 | 1919 | GAAGGCCAACATGTTCTCCGCAGTTTCATACTGTTGCTCCGT | 17 |
| CsL4.2-27 | 1920 | TGCGTACAAGGCATTCTCAAGGGAGAAACCTTGTTGGGTCAG | 18 |
| CsL4.2-28 | 1921 | CWGCAATACGGCACCCAGAGTGAAAACCCGCACAGCATCTGT | 19 |
| CsL4.2-29 | 1922 | CWGCAATACGGCACCCAGAGTGAAAACCCGCACAGCGCTTGT | |
| CsL4.2-30 | 1923 | AGGTGTTTCCCTCTCCTCMTTAGCGACTTGTCCCTCTTGATC | 20 |
| CsL4.2-31 | 1924 | AGGTGTTTCCCTCTCCTCMTTAGCGACTTGTTGCTCTTGATC | |
| CsL4.2-32 | 1925 | TTCCCAGGCTTGTCGAAGCAGTGGCGGCATWCTATCAGKAGT | 21 |
| CsL4.2-33 | 1926 | GCCGAACAGGAAGGCTGGCTCTGCACCTTGGTGMWCTTTGAG | 22 |
| CsL4.2-34 | 1927 | TCTCTTCAGCTGCTTCTCCAATCCGGCTATGATCAATTCAAG | 23 |
| CsL4.2-35 | 1928 | CACAGGCGCGCCTTAGTGATGGTGGTGATGGTGAGACCCACTTTC | 24 |

TABLE 23
Performance of the top 20 CsL4.2 hits and associated residue substitutions
relative to the parent clone L8-F301.

| | B- | | | | | | | | | | | | | | | | | | | | | | | | | | |
|---|---|---|---|---|---|---|---|---|---|---|---|---|---|---|---|---|---|---|---|---|---|---|---|---|---|---|---|
| | galactosidase | | | Residue and Sequence Position | | | | | | | | | | | | | | | | | | | | | | | |
| Clone | REP | IND | F. IND | 60 | 64 | 78 | 82 | 86 | 88 | 99 | 100 | 119 | 123 | 134 | 135 | 147 | 151 | 155 | 156 | 157 | 163 | 165 | 171 | 178 | 193 | 202 | 204 |
| L8-3F01 | 0.4 | 0.9 | 2.0 | M | Q | F | N | C | R | V | C | F | Q | V | S | F | S | K | E | E | T | S | R | D | I | K | E |
| CsL4.2-20 | 0.2 | 7.4 | 39.8 | H | — | — | F | M | L | — | S | — | — | T | D | L | Q | — | — | — | P | — | — | V | — | — | — |
| CsL4.2-15 | 0.2 | 4.0 | 25.5 | H | — | — | F | M | — | — | S | — | — | T | D | L | Q | — | — | — | — | — | — | V | — | — | — |
| CsL4.2-22 | 0.3 | 5.4 | 20.8 | H | — | — | F | M | — | I | A | — | — | T | D | L | Q | — | — | — | P | — | — | — | — | — | — |
| CsL4.2-07 | 0.3 | 6.5 | 18.9 | H | — | Y | F | M | C | I | A | — | — | T | D | L | Q | — | — | — | P | — | — | V | — | — | — |
| CsL4.2-16 | 0.3 | 3.8 | 15.2 | — | — | Y | F | M | C | — | S | — | — | T | D | L | G | N | — | — | P | R | — | V | — | — | — |
| CsL4.2-08 | 0.7 | 10.7 | 15.0 | — | — | — | F | M | — | — | A | — | H | T | D | L | Q | — | — | — | P | — | — | V | — | — | — |
| CsL4.2-24 | 0.4 | 5.4 | 14.3 | H | — | Y | F | M | C | — | A | — | — | T | — | L | G | N | — | — | P | — | — | V | — | — | — |
| CsL4.2-21 | 0.2 | 3.2 | 13.2 | — | G | — | Y | M | — | — | A | C | — | T | — | L | Q | N | — | — | — | — | — | V | — | — | — |
| CsL4.2-28 | 0.5 | 5.3 | 11.3 | — | — | Y | F | M | C | — | A | — | — | T | — | L | Q | — | Q | — | P | — | — | V | — | — | — |
| CsL4.2-30 | 0.5 | 4.9 | 10.8 | H | — | — | F | M | — | — | A | — | — | T | — | L | G | N | — | — | P | — | — | V | — | — | — |
| CsL4.2-26 | 0.3 | 3.1 | 10.6 | H | — | Y | F | M | C | — | S | — | — | T | — | L | Q | — | — | — | P | R | — | V | — | — | — |
| CsL4.2-23 | 1.0 | 10.4 | 10.5 | — | — | Y | F | M | C | — | A | — | — | T | — | L | Q | — | — | — | P | R | — | V | — | — | — |
| CsL4.2-04 | 0.4 | 4.3 | 10.2 | H | — | — | F | M | C | — | A | — | — | T | D | L | Q | N | — | G | — | — | — | E | — | — | — |
| CsL4.2-01 | 0.4 | 3.8 | 9.8 | H | — | Y | F | M | — | — | A | — | — | T | D | L | G | — | — | — | — | — | — | V | — | — | — |
| CsL4.2-17 | 0.3 | 3.1 | 9.7 | — | — | Y | F | M | C | — | A | — | — | T | — | L | Q | — | — | — | — | — | — | V | — | — | — |
| CsL4.2-12 | 0.7 | 6.4 | 9.5 | H | G | — | F | M | — | — | A | — | — | T | — | L | G | N | — | — | — | — | — | V | — | — | — |
| CsL4.2-18 | 0.7 | 6.8 | 9.3 | — | — | — | F | M | C | — | A | — | — | T | — | L | Q | — | — | — | P | R | — | V | L | — | — |
| CsL4.2-27 | 0.4 | 3.2 | 9.1 | — | — | — | F | M | C | — | S | — | — | T | D | L | Q | — | — | — | P | R | Q | E | — | — | D |
| CsL4.2-11 | 0.5 | 4.8 | 8.9 | H | G | Y | F | M | — | — | S | — | — | T | — | L | Q | — | — | — | — | — | — | E | — | X | — |

IND = induction with 20 ppb CS; REP = repression in absence of inducer; F. IND = fold induction (IND/REP)

### E. In Vitro Mutagenesis of Residue D178

[0338] Since residue position D178 [relative to TetR(B)] was found by random mutagenesis to be important for activity further mining was sought. To this end, saturation mutagenesis was performed at this position on top CsR hits CsL4.2-15 and CsL4.2-20 using the following top and bottom strand primers in a Phusion DNA polymerase PCR reaction (New England Biolabs):

(SEQ ID NO: 2136)
GCCTGGGAACTCAAANNKCACCAAGGTGCAGAGC
and
(SEQ ID NO: 2137)
GCTCTGCACCTTGGTGMNNTTTGAGTTCCCAGGC.

Mutagenesis reactions were transformed into E. coli assay strain Km3 and plated onto LB+50 ug/ml Carbenecillin. Colonies were then re-arrayed into 384 well format and replica plated onto M9 XgaI assay medium+/−5 ppb Chlorsulfuron. Putative hits were then re-arrayed and analyzed by B-galactosidase assays relative to the parent clones (FIG. 13). The results show that V178 substitutions in CsL4.2-20 to C, N, Q, S, or T all yield improved activity. However, the most active substitution, V178Q, led to an approximately 2× improvement in both CsL4.2-15 and CsL4.2-20 backbones.

### F. Modification of SU Selectivity Thru Binding Pocket Mutagenesis

### Example 5

### Crystal Structure Determination of CsR(CsL4.2)

[0339] To better understand the mechanism of the engineered sulfonylurea repressors and to help guide future design/selection efforts, the crystal structures of two repressor variants were solved by x-ray crystallography in the presence and absence of their respective ligands. The structures of ethametsulfuron repressors EsR(L7-D1 also referred to as L7-3E03 in table 1B) and EsR(L11-C6 also referred of as L11-17(C06) in table 1B) were determined in their ligand-free and ethametsulfuron-bound states, respectively. The chlorsulfuron repressor variant CsR(L4.2-20) was solved both with and without chlorsulfuron bound. The atomic coordinates from these crystal structures were determined and deposited at Protein Data Bank (PDB).

[0340] All structures showed a dimeric organization for the repressors, with helical structures generally similar to the tetracycline repressor, both in the ligand-bound and ligand-free states. In ligand-bound structures, the ligands Es and Cs were observed bound to the equivalent binding pockets where tetracycline binds to TetR. However, the orientation of the ligands and mode of interaction with the respective repressor were distinct from each other and from tetracycline (FIG. 15). Numerous specific polar and non-polar interactions were observed between the sulfonylurea repressors and their bound ligands (FIGS. 16-19).

[0341] The determination of the high-resolution crystal structures, particularly those in complex with the target ligands, has dramatically improved the ability to target the proteins for systematic improvement. Most importantly, the structures have allowed delineation of the positions of the repressors into three classes: 1) those absolutely critical for target ligand binding with no possibility of mutation, e.g. side-chains making “lynchpin” interactions with the SU backbone, 2) those that are somewhat flexible, such as side-chains making interactions with SU appendages, and 3) those that are effectively uninvolved in SU binding, the resulting conformational change, or DNA binding.

[0342] The crystal structures allow targeting research efforts to type #2 positions of the protein. The principal types of improvements that were made from the structures were mutations to improve ligand-binding affinity and selectivity. Most importantly, improvements in affinity allow effective responses at lower concentrations of the inducer, both facilitating greater penetration of induction response into plant tissue with the same dosage, and ideally use of less chemical. The increase in repressor/inducer binding affinity over the many rounds of directed evolution is consistent with type #2 protein positions contributing strongly to binding affinity. Such contributions apparently manifest both as direct interactions with SU and by more indirect relationships, such as positions facilitating ligand-dependent conformational change.

[0343] For binding specificity for the target ligand(s), several types of improvements are possible. Primarily, increased specificity for a specific SU ligand over other SUs permits the creation of multiple, orthogonal repressor/SU pairs, such as select EsR and CsR variants, which effectively show no cross-talk between the repressor/inducer pairs, allowing them to be used in conjunction with each other. This permits either independent activation of two transgenes, or independent activation and silencing of a single transgene. A secondary application of selectivity modulation is to engineer the SU repressors to be less specific for single SUs over others, while maintaining the core repressor-sulfonylurea interactions. This would create a repressor that could be modularly used with a broad range of SU herbicides, which is useful as the SU molecules have different tissue-penetration and persistence properties, in the case of different SUs being applied to a given crop. In addition, use of a single repressor between crops would lower regulatory hurdles and streamline workflow of repressor/inducer dissemination.

### Example 6

### Enhancement of Ligand Selectivity Thru Structure Guided Mutagenesis

[0344] Chlorsulfuron (Cs) repressor CsL4.2-20 is approximately 2- and 30-fold more sensitive to Cs than Metsulfuron (Ms) and Ethametsulfuron (Es), respectively (Table 26). In order to develop non-overlapping SU herbicide responsive repressors it is desired to further separate their ligand spectrum. From the CsL4.2-20 structural model we determined that residues A56, T103, Y110, L117, L131, T134, R138, P161, M166, and A173 could potentially influence docking of related sulfonylurea compounds (e.g. note L131 and T134 in FIG. 14). Cs and Es differ in decoration of both the phenyl and triazine ring structures (circled in FIG. 14). Cs has a chloride (Cl) group in the ortho position on the phenyl ring whereas it is a carboxymethyl group in Es. In addition, the meta-positions of the triazine moiety on both molecules have different substitutions: methyl and methyl-ether on Cs vs secondary amine and ethyl-ether groups on Es. Metsulfuron is essentially a hybrid between these two herbicides in that it has the triazine moiety from Cs and the phenyl moiety from Es. Saturation mutagenesis primers for each residue target are shown below. Mutagenesis reactions were carried out using Phusion DNA polymerase (New England Biolabs) and the primers listed in Table 24 and Table 25. Reactions were transformed into E. coli assay strain Km3 and plated onto LB+50 ug/ml Carbenecillin. Colonies were re-arrayed into 384-well format and replica plated onto M9 X-gal assay medium with no inducer, 10 ppb Es, 200 ppb Es, and 25 ppb Ms. Mutants having shifted selectivity relative to parent Cs activity were re-arrayed into 96-well format for further study. Putative hits were tested for repression and induction with 1, 2.5, 5, and 10 ppb Cs; 25, 50, 100, and 200 ppb Ms; and 200, 250, 300, 350, 400, 450 and 500 ppb Es. The dose of each ligand required to elicit an equal response was then used to determine relative selectivity for each clone. The ratio of Cs to Es and Cs to Ms activities as well as the relative Cs activity for the top hits is presented in Table 25. These data show that positions L131 and T134 were especially useful in modifying ligand selectivity. Mutations L131K and T134W effectively blocked Es activation: 500 ppb Es gave a similar response to 1 ppb Cs. The latter substitution unfortunately reduces Cs activity by ˜2-fold. Other residue substitutions at these positions also impact selectivity to a lesser degree. Interestingly, some mutations increased the response to Cs such as L131C while reducing, but not eliminating, Es activity. Changes in selectivity towards Ms, while occurring in most of the L131 and T134 mutants, were more modest as Cs and Ms are more similar than Cs and Es in structure.

TABLE 24
Oligonucleotides used for saturation mutagenesis of residues
potentially involved in selectivity of different sulfonylurea
herbicides.

| Oligo | Sequence | SEQ ID NO |
|---|---|---|
| A56NNKT | GCTCTGCTAGACGCCTTGNNKATTGAGATGCATGATAGGC | 1929 |
| A56NNKB | GCCTATCATGCATCTCAATMNNCAAGGCGTCTAGCAGAGC | 1930 |
| T103NNKT | GCCAAGGTCTCCCTTGGTNNKCGGTGGACGGAGCAAC | 1931 |
| T103NNKB | GTTGCTCCGTCCACCGMNNACCAAGGGAGACCTTGGC | 1932 |
| Y110NNKT | GGTGGACGGAGCAACAGNNKGAAACTGCGGAGAAC | 1933 |
| Yl10NNKB | GTTCTCCGCAGTTTCMNNCTGTTGCTCCGTCCACC | 1934 |
| L117NNKT | GAAACTGCGGAGAACATGNNKGCCTTCCTGACCCAAC | 1935 |
| L117NNKB | GTTGGGTCAGGAAGGCMNNCATGTTCTCCGCAGTTTC | 1936 |
| L131NNKT | GGTTTCTCCCTTGAGAATGCCNNKTACGCAACAGATGC | 1937 |

TABLE 25
Oligonucleotides used for saturation mutagenesis of residues
potentially involved in selectivity of different sulfonylurea
herbicides.

| Oligo | Sequence | SEQ ID NO |
|---|---|---|
| L131NNKB | GCATCTGTTGCGTAMNNGGCATTCTCAAGGGAGAAACC | 1938 |
| T134NNKT | GAATGCCTTGTACGCANNKGATGCTGTGCGGGTTTTC | 1939 |
| T134NNKB | GAAAACCCGCACAGCATCMNNTGCGTACAAGGCATTC | 1940 |
| R138NNKT | GCAACAGATGCTGTGNNKGTTTTCACTCTGGGTGC | 1941 |
| R138NNKB | GCACCCAGAGTGAAAACMNNCACAGCATCTGTTGC | 1942 |
| P161NNKT | GAGGAGAGGGAAACANNKACTCCTGATAGTATGC | 1943 |
| P161NNKB | GCATACTATCAGGAGTMNNTGTTTCCCTCTCCTC | 1944 |
| M166NNKT | GAAACACCTACTCCTGATAGTNNKCCGCCACTGCTTC | 1945 |
| M166NNKB | GAAGCAGTGGCGGMNNACTATCAGGAGTAGGTGTTTC | 1946 |
| A173NNKT | GCCACTGCTTCGACAANNKTGGGAACTCAAAGTTC | 1947 |
| A173NNKB | GAACTTTGAGTTCCCAMNNTTGTCGAAGCAGTGGC | 1948 |

TABLE 26
Relative Cs, Es, and Ms selectivity of various hits based on
B-galactosidase assays.

| Residue | Relative B-galactosidase activity | | |
|---|---|---|---|
| Substitution | Cs | Cs/Es | Cs/Ms |
| None | 1.0 | 30 | 2.0 |
| L131K | 1.0 | 200 | 20.0 |
| L131H | 1.0 | 80 | 3.3 |
| L131A | 0.5 | 60 | 1.7 |
| L131C | 2.0 | 60 | 4.0 |
| T134S | 0.5 | 40 | 2.5 |
| T134W | 0.5 | 100 | 1.6 |

Relative B-galactosidase activity was determined at various doses of Cs, Es, and Ms.
The amount of each inducer required to achieve the same level of activity was used to determine relative ligand selectivity.

[0345] The article “a” and “an” are used herein to refer to one or more than one (i.e., to at least one) of the grammatical object of the article. By way of example, “an element” means one or more element.

[0346] All publications and patent applications mentioned in the specification are indicative of the level of those skilled in the art to which this invention pertains. All publications and patent applications are herein incorporated by reference to the same extent as if each individual publication or patent application was specifically and individually indicated to be incorporated by reference.

[0347] Although the foregoing invention has been described in some detail by way of illustration and example for purposes of clarity of understanding, it will be obvious that certain changes and modifications may be practiced within the scope of the appended claims.

1. A polynucleotide construct comprising a nucleotide sequence encoding a polypeptide having a sulfonylurea (SU)-dependent stabilization domain.

2. The polynucleotide construct of claim 1, wherein said SU-dependent stabilization domain comprises
(a) a ligand binding domain of a SU chemically-regulated transcriptional regulator having at least one destabilization mutation;
(b) a DNA binding domain of a SU chemically-regulated transcriptional regulator having at least one destabilization mutation; or
(c) said SU-dependent stabilization domain comprises both (a) and (b).

3. The polynucleotide construct of claim 1, wherein the ligand binding domain of the SU chemically-regulated transcriptional regulator comprises a polypeptide having at least 80%, 85%, 90%, or 95% sequence identity to the ligand binding domain of an amino acid sequences sequence set forth in any one of SEQ ID NO:3-419, wherein said polypeptide further comprises at least one destabilization mutation.

4. The polynucleotide construct of claim 1, wherein the encoded polypeptide having the SU-dependent stabilization domain comprises a SU chemically-regulated transcriptional regulator.

5. The polynucleotide construct of claim 4, wherein the SU chemically-regulated transcriptional regulator comprise a reverse SU chemically-regulated transcriptional repressor (revSuR).

6. The polynucleotide construct of claim 4, wherein said SuR shares at least 80%, 85%, 90%, or 95% sequence identity to any one of the polypeptides set forth in SEQ ID NO:3-411, wherein said polypeptide further comprises at least one destabilization mutation.

7. The polynucleotide construct of claim 5, wherein said revSuR shares at least 80%, 85%, 90%, or 95% sequence identity to any one of the polypeptides set forth any one of SEQ ID NO:412-419, wherein said polypeptide further comprises at least one destabilization mutation.

8. The polynucleotide construct of claim 5, wherein the revSuR further comprises a transcriptional activator.

9. The polynucleotide construct of claim 2, wherein said destabilization mutation comprises the L17G mutation, the G96R mutation, or any combination thereof.

10. The polynucleotide construct of claim 8, wherein said destabilization mutation comprises the L17G mutation, the G96R mutation, or any combination thereof.

11. The polynucleotide construct of claim 1, wherein said nucleotide sequence encoding the polypeptide having the SU-dependent stabilization domain is operably linked to a polynucleotide encoding a polypeptide of interest.

12. The polynucleotide construct of claim 11, further comprises a nucleotide sequence encoding an intein.

13. The polynucleotide construct of claim 1, wherein said SU comprises a pyrimidinylsulfonylurea, a triazinylsulfonylurea, a thiadazolylurea, a chlorosulfuron, an ethametsulfuron, a thifensulfuron, a metsulfuron, a sulfometuron, a tribenuron, a chlorimuron, a nicosulfuron, or a rimsulfuron compound.

14. A DNA construct comprising the polynucleotide construct of claim 1, wherein said polynucleotide is operably linked to a promoter.

15-17. (canceled)

18. A cell having the recombinant polynucleotide of claim 1 or the DNA construct of claim 15.

19-21. (canceled)

22. A plant comprising the cell of claim 18.

23-24. (canceled)

25. A method to modulate the stability of a polypeptide of interest in a cell comprising:
a) providing a cell having a recombinant polynucleotide comprising a nucleotide sequence encoding a polypeptide having a sulfonylurea (SU)-dependent stabilization domain operably linked to a polynucleotide encoding the polypeptide of interest;
b) expressing the recombinant polynucleotide in the cell; and,
c) contacting the cell with an effective amount of a SU ligand, wherein the effective amount of the SU ligand increases the level the polypeptide of interest in the cell.

26-44. (canceled)

45. A cell comprising
a) a first recombinant construct comprising a first promoter operably linked to a SU chemically-regulated transcriptional regulator comprising a reverse SU repressor (revSuR) comprising a transcriptional activator domain, wherein said revSuR comprises a destabilization mutation; and,
b) a second recombinant construct comprising a first ligand responsive promoter comprising at least one, two or three cognate operators for said SU chemically-regulated transcriptional activator operably linked to a polynucleotide of interest.

46-57. (canceled)

58. A method to regulate expression in a plant, comprising
(a) providing a cell comprising
(i) a first recombinant construct comprising a first promoter operably linked to a SU chemically-regulated transcriptional regulator comprising a reverse SU repressor (revSuR) comprising a transcriptional activator domain, wherein said revSuR comprises a destabilization mutation; and,
(ii) a second recombinant construct comprising a first ligand responsive promoter comprising at least one, two or three cognate operators for said revSuR operably linked to a polynucleotide of interest; and,
(b) providing the cell with an effective amount of the SU ligand whereby the effective amount of the SU ligand increases the level of the revSuR and increases the level of polynucleotide of interest.

59. The method of claim 58, wherein said destabilization mutation is found within
(a) a ligand binding domain of the revSuR;
(b) a DNA binding domain of the revSuR; or
(c) both said ligand binding domain and said DNA binding domain.

60. The method of claim 58, wherein said revSuR shares at least 80%, 85%, 90%, or 95% sequence identity to any one of the polypeptides set forth any one of SEQ ID NO:412-419, wherein said polypeptide further comprises at least one destabilization mutation.

61. The method of claim 58, wherein said destabilization mutation comprises the L17G mutation, the G96R mutation, or any combination thereof.

62-69. (canceled)

The application's sequence listing, which the Patent Office published only in electronic form, follows.

SEQUENCE LISTING (2137 sequences)

SEQ ID NO: 1 - protein, 207 aa, Escherichia coli
MSRLDKSKVINSALELLNEVGIEGLTTRKLAQKLGVEQPTLYWHVKNKRALLDALAIEMLDRHHTHFCPLEGESWQDFLRNNAKSFRCALLSHRDGAKVHLGTRPTEKQYETLENQLAFLCQQGFSLENALYALSAVGHFTLGCVLEDQEHQVAKEERETPTTDSMPPLLRQAIELFDHQGAEPAFLFGLELIICGLEKQLKCESGS

SEQ ID NO: 2 - protein, 208 aa, Artificial Sequence
  synthetic construct; Sulfonylurea responsive repressor
MGSRLDKSKVINSALELLNEVGIEGLTTRKLAQKLGVEQPTLYWHVKNKRALLDALAIEMLDRHHTHFCPLEGESWQDFLRNNAKSFRCALLSHRDGAKVHLGTRPTEKQYETLENQLAFLCQQGFSLENALYALSAVGHFTLGCVLEDQEHQVAKEERETPTTDSMPPLLRQAIELFDHQGAEPAFLFGLELIICGLEKQLKCESGS

SEQ ID NO: 3 - protein, 208 aa, Artificial Sequence
  synthetic construct; Sulfonylurea responsive repressor
MGSRLDKSKVINSALELLNEVGIEGLTTRKLAQKLGVEQPTLYWHVKNKRALLDALAIEMLDRHATHFCPLEGESWQDFLRNNAKSFRCALLSHRDGAKVCLGTAVTEKQYETMENILAFLCQQGFSLENALYARRAVIAFTLGCVLWDQEYQVAKEERETPTTDSMPPLLRQARELIDHQGAEPAFLFGLELIICGLEKQLKCESGS

SEQ ID NO: 4 - protein, 208 aa, Artificial Sequence
  synthetic construct; Sulfonylurea responsive repressor
MGSRLDKSKVINSALELLNEVGIEGLTTRKLAQKLGVEQPTLYWHVKNKRALLDALAIEMLDRHNTHFCPLEGESWQDFLRNNAKSWRCALLSHRDGAKVVLGTAITEKQYETHENPLAFLCQQGFSLENALYAIAAVRRFTLGCVLVDQERQVAKEERETPTTDSMPPLLRQASELQDHQGAEPAFLFGLELIICGLEKQLKCERGS

SEQ ID NO: 5 - protein, 208 aa, Artificial Sequence
  synthetic construct; Sulfonylurea responsive repressor
MGSRLDKSKVINSALELLNEVGIEGLTTRKLAQKLGVEQPTLYWHVKNKRALLDALAIEMLDRHATHFCPLEGESWQDFLRNNAKSMRCALLSHRDGAKVCLGTGFTEKQYETAENSLAFLCQQGFSLENALYAMQAVCIFTLGCVLLDQELQVAKEERETPTTDSMPPLLRQALELKDHQGAEPAFLFGLELIICGLEKQLKCESGS

SEQ ID NO: 6 - protein, 208 aa, Artificial Sequence
  synthetic construct; Sulfonylurea responsive repressor
MGSRLDKSKVINSALELLNEVGIEGLTTRKLAQKLGVEQPTLYWHVKNKRALLDALAIEMMDRHQTHFCPLEGESWQDFLRNNAKSMRCALLSHRDGAKVFLGTAWTEKQYETVENLLAFLCQQGFSLENALYALNAVATFTLGCVLWDQEKQVAKEERETPTTDSMPPLLRQAHELGDHQGAEPAFLFGLELIICGLEKQLKSESGS

SEQ ID NO: 7 - protein, 208 aa, Artificial Sequence
  synthetic construct; Sulfonylurea responsive repressor
MGSRLDKSKVINSALELLNEVGIEGLTTRKLAQKLGVEQPTLYWHVKNKRALLDALAIEMMDRHHTHFCPLEGESWQDFLRNTAKSYRCALLSHRDGAKVCLGTAITEKQYETKENNLAFLCQQGFSLENALYARQAVRVFTLGCVLFDQEMQVAKEERETPTTDSMPPLLRQASELLDHQGAEPAFLFGLELIICGLEKQLKSESGS

SEQ ID NO: 8 - protein, 208 aa, Artificial Sequence
  synthetic construct; Sulfonylurea responsive repressor
MGSRLDKSKVINSALELLNEVGIEGLTTRKLAQKLGVEQPTLYWHVKNKRALLDALAIEMLDRHNTHFCPLEGESWQDFLRNSAKSMRCALLSHRDGAKVLLGTAVTEKQYETTENSLAFLCQQGFSLENALYAIRAVRTFTLGCVLVDQERQVAKEERETPTTDSMPPLLRQAKELLDHQGAEPAFLFGLELIICGLEKQLKCESGS

SEQ ID NO: 9 - protein, 208 aa, Artificial Sequence
  synthetic construct; Sulfonylurea responsive repressor
MGSRLDKSKVINSALELLNEVGIEGLTTRKLAQKLGVEQPTLYWHVKNKRALLDALAIEMLDRHATHFCPLEGESWQDFLRNNAKSMRCALLSHRDGAKVWLGTAWTEKQYETPENVLAFLCQQGFSLENALYASRAVVTFTLGCVLTDQEKQVAKEERETPTTDSMPPLLRQAWELLDHQGAEPAFLFGLELIICGLEKQLKCESGS

SEQ ID NO: 10 - protein, 208 aa, Artificial Sequence
  synthetic construct; Sulfonylurea responsive repressor
MGSRLDKSKVINSALELLNEVGIEGLTTRKLAQKLGVEQPTLYWHVKNKRALLDALAIEMMDRHQTHFCPLEGESWQDFLRNTAKSMRCALLSHRDGAKVWLGTRWTEKQYETPENMLAFLCQQGFSLENALYAWSAVCNFTLGCVLSDQERQVAKEERETPTTDSMPPLLRQAWELSDHQGAEPAFLFGLELIICGLEKQLKCESGS

SEQ ID NO: 11 - protein, 208 aa, Artificial Sequence
  synthetic construct; Sulfonylurea responsive repressor
MGSRLDKSKVINSALELLNEVGIEGLTTRKLAQKLGVEQPTLYWHVKNKRALLDALAIEMLDRHATHFCPLEGESWQDFLRNNAKSMRCALLSHRDGAKVMLGTRATEKQYETVENRLAFLCQQGFSLENALYAVRAVHWFTLGCVLIDQEMQVAKEERETPTTDSMPPLLRQAYELYDHQGAEPAFLFGLELIICGLEKQLKCESGS

SEQ ID NO: 12 - protein, 208 aa, Artificial Sequence
  synthetic construct; Sulfonylurea responsive repressor
MGSRLDKSKVINSALELLNEVGIEGLTTRKLAQKLGVEQPTLYWHVKNKRALLDALAIEMADRHHTHFCPLEGESWQDFLRNNAKSMRCALLSHRDGAKVWLGTAWTEKQYETTENMLAFLCQQGFSLENALYAWRAVTMFTLGCVLRDQEWQVAKEERETPTTDSMPPLLRQALELGDHQGAEPAFLFGLELIICGLEKQLKCESGS

SEQ ID NO: 13 - protein, 208 aa, Artificial Sequence
  synthetic construct; Sulfonylurea responsive repressor
MGSRLDKSKVINSALELLNEVGIEGLTTRKLAQKLGVEQPTLYWHVKNKRALLDALAIEMLDRHATHFCPLEGESWQDFLRNNAKSYRCALLSHRDGAKVYLGTAVTEKQYETAENQLAFLCQQGFSLENALYAVKAVAGFTLGCVLWDQESQVAKEERETPTTASMPPLLRQAVELADHQGAEPAFLFGLELIICGLEKQLKCESGS

SEQ ID NO: 14 - protein, 208 aa, Artificial Sequence
  synthetic construct; Sulfonylurea responsive repressor
MGSRLDKSKVINSALELLNEVGIEGLTTRKLAQKLGVEQPTLYWHVKNKRALLDALAIEMMDRHATHICPLEGESWQDFLRNNAKSMRCALLSHRDGAKVCLGTRWTEQQYEAAENMLAFLCQQGFSLENALYAVSAVRVFTLGCVLFDQESQVAKEERETPTTASMPPLLRQAWELKDHQGAEPAFLFGLELIICGLEKQLKCESGS

SEQ ID NO: 15 - protein, 208 aa, Artificial Sequence
  synthetic construct; Sulfonylurea responsive repressor
  misc (80)..(80): Xaa = any amino acid
  misc_feature (143)..(143): Xaa can be any naturally occurring amino acid
MGSRLDKSKVINSALELLNEVGIEGLTTRKLAQKLGVEQPTLYWHVKNKRALLDALAIEMMDRHQTHYCPLEGESWQDFXRNNAKSMRCALLSHRDGAKVCLGTRWTEQQYESAENMLAFLCQQGFSLENALYAMSAVRVFTXGCVLFDQESQVAKEERETPTTASMPPLLRQAWELKDHQGAEPAFLFGLELIICGLEKQLKCESGS

SEQ ID NO: 16 - protein, 208 aa, Artificial Sequence
  synthetic construct; Sulfonylurea responsive repressor
MGSRLDKSKVINSALELLNEVGIEGLTTRKLAQKLGVEQPTLYWHVKNKRALLDALAIEMMDRHQTHFCPLEGESWQDFLRNNAKSMRCALLSHRDGAKVCLGTRWTEKQYETAENMLAFLCQQGFSLENALYAMSAVRVFTLGCVLFDQELQVAKEERETPTTASMPPLVRQVWELKDHQGAEPAFLFGLELIICGLEKQLKCESGS

SEQ ID NO: 17 - protein, 208 aa, Artificial Sequence
  synthetic construct; Sulfonylurea responsive repressor
MGSRLDKSKVINSALELLNEVGIEGLTTRKLAQKLGVEQPTLYWHVKNKRALLDALAIEMMDRHATHYCPLEGESWQDFLRNNAKSMRCALLSHRDGAKVCLGTRWTEKHYETAENMLAFLCQQGFSLENALYAVSAVRVFTLGCVLFDQESQVAKEERETPTTASMPPLLRQAWELKDHQGAEPAFLFGLELIICGLEKQLKCESGS

SEQ ID NO: 18 - protein, 208 aa, Artificial Sequence
  synthetic construct; Sulfonylurea responsive repressor
MGSRLDKSKVINSALELLNEVGIEGLTTRKLAQKLGVEQPTLYWHVKNKRALLDALAIEMMDRHATHYCPLEGESWQDFLRNTAKSMRCALLSHRDGAKVCLGTRWTEQQYESAENMLAFLCQQGFSLENALYAVSAVRVFTLGCVLFDQESQVAKEERETPTTASMPPLVRQGWELKDHQGAEPAFLFGLELIICGLEKQLKCESGS

SEQ ID NO: 19 - protein, 208 aa, Artificial Sequence
  synthetic construct; Sulfonylurea responsive repressor
MGSRLDKSKVINSALELLNEVGIEGLTTRKLAQKLGVEQPTLYWHVKNKRALLDALAIEMMDRHQTHYCPLEGESWQDFLRNNAKSMRCALLSHRDGAKVCLGTRWTEQLYETAENMLAFLCQQGFSLENALYAVSAVRVFTLGCVLFDQELQVAKEERETPTTASMPPLLRQAWELKDHQGAEPAFLFGLELIICGLEKQLKCESGS

SEQ ID NO: 20 - protein, 208 aa, Artificial Sequence
  synthetic construct; Sulfonylurea responsive repressor
MGSRLDKSKVINSALELLNEVGIEGLTTRKLAQKLGVEQPTLYWHVKNKRALLDALAIEMMDRHATHYCPLEGESWQDFLRNNAKSMRCALLSHRDGAKVCLGTRWTEQQYETAENMLAFLCQQGFSLENALYAMSAVRVFTLGCVLFDQESQVAKEERETPTTASMPPLLRQVWELKDHQGAEPAFLFGLELIICGLEKQLKCESGS

SEQ ID NO: 21 - protein, 208 aa, Artificial Sequence
  synthetic construct; Sulfonylurea responsive repressor
MGSRLDKSKVINSALELLNEVGIEGLTTRKLAQKLGVEQPTLYWHVKNKRALLDALAIEMMDRHQTHVCPLEGESWQDFLRNNAKSMRCALLSHRDGAKVCLGTRWTEQLYETAENQLAFLCQQGFSLENALYAMSAVRVFTLGCVLFDQELQVAKEERETPTTASMPPLLRQVWELKDHQGAEPAFLFGLELIICGLEKQLKCESGS

SEQ ID NO: 22 - protein, 208 aa, Artificial Sequence
  synthetic construct; Sulfonylurea responsive repressor
MGSRLDKSKVINSALELLNEVGIEGLTTRKLAQKLGVEQPTLYWHVKNKRALLDALAIEMMDRHQTHICPLEGESWQDFLRNTAKSMRCALLSHRDGAKVCLGTRWTEQHYETAENQLAFLCQQGFSLENALYAMSAVRVFTLGCVLFDQESQVAKEERETPTTASMPPLVRQAWELKDHQGAEPAFLFGLELIICGLEKQLKCESGS

SEQ ID NO: 23 - protein, 208 aa, Artificial Sequence
  synthetic construct; Sulfonylurea responsive repressor
MGSRLDKSKVINSALELLNEVGIEGLTTRKLAQKLGVEQPTLYWHVKNKRALLDALAIEMMDRHQTHVCPLEGESWQDFLRNNAKSMRCALLSHRDGAKVCLGTRWTEKQYEAAENMLAFLCQQGFSLENALYAVSAVRVFTLGCVLFDQESQVAKEERETPTTASMPPLLRQGWELKDHQGAEPAFLFGLELIICGLEKQLKCESGS

SEQ ID NO: 24 - protein, 208 aa, Artificial Sequence
  synthetic construct; Sulfonylurea responsive repressor
MGSRLDKSKVINSALELLNEVGIEGLTTRKLAQKLGVEQPTLYWHVKNKRALLDALAIEMMDRHQTHYCPLEGESWQDFLRNTAKSMRCALLSHRDGAKVCLGTRWTEQHYETAENMLAFLCQQGFSLENALYAMSAVRVFTLGCVLFDQELQVAKEERETPTTASMPPLVRQVWELKDHQGAEPAFLFGLELIICGLEKQLKCESGS

SEQ ID NO: 25 - protein, 208 aa, Artificial Sequence
  synthetic construct; Sulfonylurea responsive repressor
MGSRLDKSKVINSALELLNEVGIEGLTTRKLAQKLGVEQPTLYWHVKNKRALLDALAIEMMDRHQTHVCPLEGESWQDFLRNNAKSMRCALLSHRDGAKVCLGTRWTEQLYETAENQLAFLCQQGFSLENALYAMSAVRNFTLGCVLFDQESQVAKEERETPTTASMPPLVRQAWELKDHQGAEPAFLFGLELIICGLEKQLKCESGS

SEQ ID NO: 26 - protein, 208 aa, Artificial Sequence
  synthetic construct; Sulfonylurea responsive repressor
MGSRLDKSKVINSALELLNEVGIEGLTTRKLAQKLGVEQPTLYWHVKNKRALLDALAIEMMDRHQTHYCPLEGESWQDFLRNNAKSMRCALLSHRDGAKVCLGTRWTEQLYETAENMLAFLCQQGFSLENALYAVSAVRVFTLGCVLFDQESQVAKEERETPTTASMPPLVRQVWELKDHQGAEPAFLFGLELIICGLEKQLKCESGS

SEQ ID NO: 27 - protein, 208 aa, Artificial Sequence
  synthetic construct; Sulfonylurea responsive repressor
MGSRLDKSKVINSALELLNEVGIEGLTTRKLAQKLGVEQPTLYWHVKNKRALLDALAIEMMDRHATHVCPLEGESWQDFLRNNAKSMRCALLSHRDGAKVCLGTRWTEQMYETAENQLAFLCQQGFSLENALYAMSAVRVFTLGCVLFDQESQVAKEERETPTTASMPPLVRQAWELKDHQGAEPAFLFGLELIICGLEKQLKCESGS

SEQ ID NO: 28 - protein, 208 aa, Artificial Sequence
  synthetic construct; Sulfonylurea responsive repressor
MGSRLDKSKVINSALELLNEVGIEGLTTRKLAQKLGVEQPTLYWHVKNKRALLDALAIEMMDRHQTHVCPLEGESWQDFLRNNAKSMRCALLSHRDGAKVCLGTRWTEKQYESAENMLAFLCQQGFSLENALYAVSAVRVFTLGCVLFDQELQVAKEERETPTTASMPPLLRQGWELNDHQGAEPAFLFGLELIICGLEKQLKCESGS

SEQ ID NO: 29 - protein, 208 aa, Artificial Sequence
  synthetic construct; Sulfonylurea responsive repressor
MGSRLDKSKVINSALELLNEVGIEGLTTRKLAQKLGVEQPTLYWHVKNKRALLDALAIEMMDRHQTHYCPLEGESWQDFLRNNAKSMRCALLSHRDGAKVCLGTRWTEQHYEGAENMLAFLCQQGFSLENALYAMSAVRVFTLGCVLFDQELQVAKEERETPTTASMPPLVRQVWELKDHQGAEPAFLFGLELIICGLEKQLKCESGS

SEQ ID NO: 30 - protein, 208 aa, Artificial Sequence
  synthetic construct; Sulfonylurea responsive repressor
  MISC_FEATURE (152)..(152): Xaa = any amino acid
MGSRLDKSKVINSALELLNEVGIEGLTTRKLAQKLGVEQPTLYWHVKNKRALLDALAIEMMDRHATHVCPLEGESWQDFLRNNAKSMRCALLSHRDGAKVCLGTRWTEQMYETAENQLAFLCQQGFSLENALYAMSAVRVFTLGCVLFDQEXQVAKEERETPTTASMPPLLRQVWELKDHQGAEPAFLFGLELIICGLEKQLKCESGS

SEQ ID NO: 31 - protein, 208 aa, Artificial Sequence
  synthetic construct; Sulfonylurea responsive repressor
MGSRLDKSKVINSALELLNEVGIEGLTTRKLAQKLGVEQPTLYWHVKNKRALLDALAIEMMDRHATHYCPLEGESWQDFLRNTAKSMRCALLSHRDGAKVCLGTRWTEKQYETAENQLAFLCQQGFSLENALYAMSAVRVFTLGCVLFDQELQVAKEERETPTTASMPPLVRQVWELKDHQGAEPAFLFGLELIICGLEKQLKCESGS

SEQ ID NO: 32 - protein, 208 aa, Artificial Sequence
  synthetic construct; Sulfonylurea responsive repressor
  MISC_FEATURE (65)..(65): Xaa = any amino acid
MGSRLDKSKVINSALELLNEVGIEGLTTRKLAQKLGVEQPTLYWHVKNKRALLDALAIEMMDRHXTHYCPLEGESWQDFLRNTAKSMRCALLSHRDGAKVCLGTRWTEKQYETAENQLAFLCQQGFSLENALYAMSAVRVFTLGCVLFDQESQVAKEERETPTTASMPPLVRQGWELKDHQGAEPAFLFGLELIICGLEKQLKCESGS

SEQ ID NO: 33 - protein, 208 aa, Artificial Sequence
  synthetic construct; Sulfonylurea responsive repressor
MGSRLDKSKVINSALELLNEVGIEGLTTRKLAQKLGVEQPTLYWHVKNKRALLDALAIEMMDRHQTHMCPLEGESWQDFLRNNAKSMRCALLSHRDGAKVCLGTRWTEKHYETAENMLAFLCQQGFSLENALYAVSAVRVFTLGCVLFDQESQVAKEERETPTTASMPPLVRQGWELKDHQGAEPAFLFGLELIICGLEKQLKCESGS

SEQ ID NO: 34 - protein, 208 aa, Artificial Sequence
  synthetic construct; Sulfonylurea responsive repressor
MGSRLDKSKVINSALELLNEVGIEGLTTRKLAQKLGVEQPTLYWHVKNKRALLDALAIEMMDRHQTHLCPLEGESWQDFLRNNAKSMRCALLSHRDGAKVCLGTRWTEKQYESAENMLAFLCQQGFSLENALYAMSAVRVFTLGCVLFDQESQVAKEERETPTTASMPPLVRQVWELKDHQGAEPAFLFGLELIICGLEKQLKCESGS

SEQ ID NO: 35 - protein, 208 aa, Artificial Sequence
  synthetic construct; Sulfonylurea responsive repressor
MGSRLDKSKVINSALELLNEVGIEGLTTRKLAQKLGVEQPTLYWHVKNKRALLDALAIEMMDRHQTHYCPLEGESWQDFLRNTAKSMRCALLSHRDGAKVCLGTRWTEKHYETAENQLAFLCQQGFSLENALYAVSAVRVFTLGCVLFDQESQVAKEERETPTTASMPPLVRQVWELKDHQGAEPAFLFGLELIICGLEKQLKCESGS

SEQ ID NO: 36 - protein, 208 aa, Artificial Sequence
  synthetic construct; Sulfonylurea responsive repressor
MGSRLDKSKVINSALELLNEVGIEGLTTRKLAQKLGVEQPTLYWHVKNKRALLDALAIEMMDRHQTHYCPLEGESWQDFLRNTAKSMRCALLSHRDGAKVCLGTRWTEQLYETAENQLAFLCQQGFSLENALYAMSAVRVFTLGCVLFDQELQVAKEERETPTTASMPPLLRQAWELKDHQGAEPAFLFGLELIICGLEKQLKCESGS

SEQ ID NO: 37 - protein, 208 aa, Artificial Sequence
  synthetic construct; Sulfonylurea responsive repressor
  MISC_FEATURE (68)..(68): Xaa = any amino acid
  misc_feature (113)..(113): Xaa can be any naturally occurring amino acid
MGSRLDKSKVINSALELLNEVGIEGLTTRKLAQKLGVEQPTLYWHVKNKRALLDALAIEMMDRHQTHXCPLEGESWQDFLRNTAKSMRCALLSHRDGAKVCLGTRWTEQQYEXAENLLAFLCQQGFSLENALYAMSAVRVFTLGCVLFDQEIQVAKEERETPTTASMPPLLRQVLELKDHQGAEPAFLFGLELIICGLEKQLKCESGS

SEQ ID NO: 38 - protein, 208 aa, Artificial Sequence
  synthetic construct; Sulfonylurea responsive repressor
MGSRLDKSKVINSALELLNEVGIEGLTTRKLAQKLGVEQPTLYWHVKNKRALLDALAIEMMDRHQTHYCPLEGESWQDFLRNTAKSMRCALLSHRDGAKVCLGTRWTEKHYETAENMLAFLCQQGFSLENALYAVSAVRVFTLGCVLFDQESQVAKEERETPTTASMPPLLRQVWELKDHQGAEPAFLFGLELIICGLEKQLKCESGS

SEQ ID NO: 39 - protein, 208 aa, Artificial Sequence
  synthetic construct; Sulfonylurea responsive repressor
MGSRLDKSKVINSALELLNEVGIEGLTTRKLAQKLGVEQPTLYWHVKNKRALLDALAIEMMDRHQTHVCPLEGESWQDFLRNNAKSMRCALLSHRDGAKVCLGTRWTEQLYETAENMLAFLCQQGFSLENALYAMSAVRVFTLGCVLFDQESQVAKEERETPTTASMPPLVRQGWELKDHQGAEPAFLFGLELIICGLEKQLKCESGS

SEQ ID NO: 40 - protein, 208 aa, Artificial Sequence
  synthetic construct; Sulfonylurea responsive repressor
  misc_feature (110)..(110): Xaa can be any naturally occurring amino acid
MGSRLDKSKVINSALELLNEVGIEGLTTRKLAQKLGVEQPTLYWHVKNKRALLDALAIEMMDRHATHLCPLEGESWQDFLRNNAKSMRCALLSHRDGAKVCLGTRWTEKXYESAENQLAFLCQQGFSLENALYAMSAVRVFTLGCVLFDQELQVAKEERETPTTASMPPLLRQAWELKDHQGAEPAFLFGLELIICGLEKQLKCESGS

SEQ ID NO: 41 - protein, 208 aa, Artificial Sequence
  synthetic construct; Sulfonylurea responsive repressor
MGSRLDKSKVINSALELLNEVGIEGLTTRKLAQKLGVEQPTLYWHVKNKRALLDALAIEMMDRHQTHYCPLEGESWQDFLRNTAKSMRCALLSHRDGAKVCLGTRWTEQQYETAENMLAFLCQQGFSLENALYAVSAVRNFTLGCVLFDQESQVAKEERETPTTASMPPLVRQAWELKDHQGAEPAFLFGLELIICGLEKQLKCESGS

SEQ ID NO: 42 - protein, 208 aa, Artificial Sequence
  synthetic construct; Sulfonylurea responsive repressor
MGSRLDKSKVINSALELLNEVGIEGLTTRKLAQKLGVEQPTLYWHVKNKRALLDALAIEMMDRHQTHFCPLEGESWQDFLRNNAKSMRCALLSHRDGAKVWLGTRWTEQMYETAENMLAFLCQQGFSLENALYAVSAVRNFTLGCVLFDQESQVAKEERETPTTASMPPLLRQGWELKDHQGAEPAFLFGLELIICGLEKQLKCESGS

SEQ ID NO: 43 - protein, 208 aa, Artificial Sequence
  synthetic construct; Sulfonylurea responsive repressor
MGSRLDKSKVINSALELLNEVGIEGLTTRKLAQKLGVEQPTLYWHVKNKRALLDALAIEMMDRHQTHFCPLEGESWQDFLRNTAKSMRCALLSHRDGAKVCLGTRWTEQQYETAENMLAFLCQQGFSLENALYAMSAVRVFTLGCVLFDQESQVAKEERETPTTASMPPLVRQAWELKDHQGAEPAFLFGLELIICGLEKQLKCESGS

SEQ ID NO: 44 - protein, 208 aa, Artificial Sequence
  synthetic construct; Sulfonylurea responsive repressor
MGSRLDKSKVINSALELLNEVGIEGLTTRKLAQKLGVEQPTLYWHVKNKRALLDALAIEMMDRHQTHYCPLEGESWQDFLRNTAKSMRCALLSHRDGAKVCLGTRWTEQQYESAENQLAFLCQQGFSLENALYAVSAVRVFTLGCVLFDQESQVAKEERETPTTASMPPLLRQAWELKDHQGAEPAFLFGLELIICGLEKQLKCESGS

SEQ ID NO: 45 - protein, 208 aa, Artificial Sequence
  synthetic construct; Sulfonylurea responsive repressor
MGSRLDKSKVINSALELLNEVGIEGLTTRKLAQKLGVEQPTLYWHVKNKRALLDALAIEMMDRHQTHMCPLEGESWQDFLRNNAKSMRCALLSHRDGAKVCLGTRWTEKMYEAAENMLAFLCQQGFSLENALYAVSAVRVFTLGCVLFDQELQVAKEERETPTTASMPPLLRQAWELKDHQGAEPAFLFGLELIICGLEKQLKCESGS

SEQ ID NO: 46 - protein, 208 aa, Artificial Sequence
  synthetic construct; Sulfonylurea responsive repressor
MGSRLDKSKVINSALELLNEVGIEGLTTRKLAQKLGVEQPTLYWHVKNKRALLDALAIEMMDRHATHYCPLEGESWQDFIRNTAKSMRCALLSHRDGAKVCLGTRWTEKHYETAENMLAFLCQQGFSLENALYAVSAVGNFTLGCVLFDQESQVAKEERETPTTASMPPLLRQVWELKDHQGAEPAFLFGLELIICGLEKQLKCESGS

SEQ ID NO: 47 - protein, 208 aa, Artificial Sequence
  synthetic construct; Sulfonylurea responsive repressor
MGSRLDKSKVINSALELLNEVGIEGLTTRKLAQKLGVEQPTLYWHVKNKRALLDALAIEMMDRHATHLCPLEGESWQDFLRNTAKSMRCALLSHRDGAKVCLGTRWTEKQYESAENQLAFLCQQGFSLENALYAMSAVRVFTLGCVLFDQESQVAKEERETPTTASMPPLLRQVWELKDHQGAEPAFLFGLELIICGLEKQLKCESGS

SEQ ID NO: 48 - protein, 208 aa, Artificial Sequence
  synthetic construct; Sulfonylurea responsive repressor
MGSRLDKSKVINSALELLNEVGIEGLTTRKLAQKLGVEQPTLYWHVKNKRALLDALAIEMMDRHQTHYCPLEGESWQDFLRNNAKSMRCALLSHRDGAKVCLGTRWTEQMYESAENMLAFLCQQGFSLENALYAVSAVRVFTLGCVLFDQESQVAKEERETPTTASMPPLLRQGWELKDHQGAEPAFLFGLELIICGLEKQLKCESGS

SEQ ID NO: 49 - protein, 208 aa, Artificial Sequence
  synthetic construct; Sulfonylurea responsive repressor
MGSRLDKSKVINSALELLNEVGIEGLTTRKLAQKLGVEQPTLYWHVKNKRALLDALAIEMMDRHQTHFCPLEGESWQDFLRNNAKSMRCALLSHRDGAKVCLGTRWTEQMYEGAENMLAFLCQQGFSLENALYAMSAVRVFTLGCVLFDQESQVAKEERETPTTASMPPLLRQGWELKDHQGAEPAFLFGLELIICGLEKQLKCESGS

SEQ ID NO: 50 - protein, 208 aa, Artificial Sequence
  synthetic construct; Sulfonylurea responsive repressor
MGSRLDKSKVINSALELLNEVGIEGLTTRKLAQKLGVEQPTLYWHVKNKRALLDALAIEMMDRHQTHYCPLEGESWQDFLRNNAKSMRCALLSHRDGAKVCLGTRWTEQHYEAAENMLAFLCQQGFSLENALYAMSAVRVFTLGCVLFDQESQVAKEERETPTTASMPPLVRQAWELKDHQGAEPAFLFGLELIICGLEKQLKCESGS

SEQ ID NO: 51 - protein, 208 aa, Artificial Sequence
  synthetic construct; Sulfonylurea responsive repressor
MGSRLDKSKVINSALELLNEVGIEGLTTRKLAQKLGVEQPTLYWHVKNKRALLDALAIEMMDRHATHYCPLEGESWQDFLRNNAKSMRCALLSHRDGAKVCLGTRWTEQLYETAENQLAFLCQQGFSLENALYAMSAVRNFTLGCVLFDQESQVAKEERETPTTASMPPLVRQAWELKDHQGAEPAFLFGLELIICGLEKQLKCESGS

SEQ ID NO: 52 - protein, 208 aa, Artificial Sequence
  synthetic construct; Sulfonylurea responsive repressor
MGSRLDKSKVINSALELLNEVGIEGLTTRKLAQKLGVEQPTLYWHVKNKRALLDALAIEMMDRHATHMCPLEGESWQDFLRNTAKSMRCALLSHRDGAKVCLGTRWTEKQYETAENMLAFLCQQGFSLENALYAVSAVRVFTLGCVLFDQESQVAKEERETPTTASMPPLLRQVWELKDHQGAEPAFLFGLELIICGLEKQLKCESGS

SEQ ID NO: 53 - protein, 208 aa, Artificial Sequence
  synthetic construct; Sulfonylurea responsive repressor
MGSRLDKSKVINSALELLNEVGIEGLTTRKLAQKLGVEQPTLYWHVKNKRALLDALAIEMMDRHATHYCPLEGESWQDFLRNTAKSMRCALLSHRDGAKVCLGTRWTEKLYETAENMLAFLCQQGFSLENALYAVSAVRVFTLGCVLFDQELQVAKEERETPTTASMPPLVRQAWELKDHQGAEPAFLFGLELIICGLEKQLKCESGS

SEQ ID NO: 54 - protein, 208 aa, Artificial Sequence
  synthetic construct; Sulfonylurea responsive repressor
MGSRLDKSKVINSALELLNEVGIEGLTTRKLAQKLGVEQPTLYWHVKNKRALLDALAIEMMDRHATHFCPLEGESWQDFLRNTAKSMRCALLSHRDGAKVCLGTRWTEQLYETAENMLAFLCQQGFSLENALYAMSAVRVFTLGCVLFDQESQVAKEERETPTTASMPPLVRQGWELKDHQGAEPAFLFGLELIICGLEKQLKCESGS

SEQ ID NO: 55 - protein, 208 aa, Artificial Sequence
  synthetic construct; Sulfonylurea responsive repressor
MGSRLDKSKVINSALELLNEVGIEGLTTRKLAQKLGVEQPTLYWHVKNKRALLDALAIEMMDRHQTHLCPLEGESWQDFLRNNAKSMRCALLSHRDGAKVCLGTRWTEKHYEAAENQLAFLCQQGFSLENALYAMSAVRVFTLGCVLFDQESQVAKEERETPTTASMPPLLRQGWELKDHQGAEPAFLFGLELIICGLEKQLKCESGS

SEQ ID NO: 56 - protein, 208 aa, Artificial Sequence
  synthetic construct; Sulfonylurea responsive repressor
  MISC_FEATURE (65)..(65): Xaa can be any naturally occurring amino acid
  misc_feature (110)..(110): Xaa can be any naturally occurring amino acid
MGSRLDKSKVINSALELLNEVGIEGLTTRKLAQKLGVEQPTLYWHVKNKRALLDALAIEMMDRHXTHYCPLEGESWQDFLRNNAKSMRCALLSHRDGAKVWLGTRWTEQXYETAENQLAFLCQQGFSLENALYAVSAVRVFTLGCVLFDQELQVAKEERETPTTASMPPLLRQGLELKDHQGAEPAFLFGLELIICGLEKQLKCESGS

SEQ ID NO: 57 - protein, 208 aa, Artificial Sequence
  synthetic construct; Sulfonylurea responsive repressor
MGSRLDKSKVINSALELLNEVGIEGLTTRKLAQKLGVEQPTLYWHVKNKRALLDALAIEMMDRHATHYCPLEGESWQDFLRNTAKSMRCALLSHRDGAKVCLGTRWTEQQYESAENMLAFLCQQGFSLENALYAMSAVRVFTLGCVLFDQELQVAKEERETPTTASMPPLVRQGWELKDHQGAEPAFLFGLELIICGLEKQLKCESGS

SEQ ID NO: 58 - protein, 208 aa, Artificial Sequence
  synthetic construct; Sulfonylurea responsive repressor
MGSRLDKSKVINSALELLNEVGIEGLTTRKLAQKLGVEQPTLYWHVKNKRALLDALAIEMMDRHATHYCPLEGESWQDFLRNTAKSMRCALLSHRDGAKVCLGTRWTEQQYETAENMLAFLCQQGFSLENALYAVSAVRVFTLGCVLFDQELQVAKEERETPTTASMPPLVRQAWELKDHQGAEPAFLFGLELIICGLEKQLKCESGS

SEQ ID NO: 59 - protein, 208 aa, Artificial Sequence
  synthetic construct; Sulfonylurea responsive repressor
  MISC_FEATURE (68)..(68): Xaa = any amino acid
  MISC_FEATURE (83)..(83): Xaa = any amino acid
  MISC_FEATURE (101)..(101): Xaa = any amino acid
  MISC_FEATURE (171)..(171): Xaa = any amino acid
MGSRLDKSKVINSALELLNEVGIEGLTTRKLAQKLGVEQPTLYWHVKNKRALLDALAIEMMDRHPTHXCPLEGESWQDFLRNXAKSMRCALLSHRDGAKVXLGTRWTEQLYETAENMLAFLCQQGFSLENALYAMSAVRVFTLGCVLFDQESQVAKEERETPTTASMPPLXRQVWELKDHQGAEPAFLFGLELIICGLEKQLKCESGS

SEQ ID NO: 60 - protein, 208 aa, Artificial Sequence
  synthetic construct; Sulfonylurea responsive repressor
  MISC_FEATURE (171)..(171): Xaa = any amino acid
MGSRLDKSKVINSALELLNEVGIEGLTTRKLAQKLGVEQPTLYWHVKNKRALLDALAIEMMDRHATHYCPLEGESWQDFLRNNAKSMRCALLSHRDGAKVCLGTRWTEQLYETAENQLAFLCQQGFSLENALYAVSAVRVFTLGCVLFDQESQVAKEERETPTTASMPPLXRQGWELKDHQGAEPAFLFGLELIICGLEKQLKCESGS

SEQ ID NO: 61 - protein, 208 aa, Artificial Sequence
  synthetic construct; Sulfonylurea responsive repressor
MGSRLDKSKVINSALELLNEVGIEGLTTRKLAQKLGVEQPTLYWHVKNKRALLDALAIEMMDRHQTHYCPLEGESWQDFLRNNAKSMRCALLSHRDGAKVCLGTRWTEQQYEAAENQLAFLCQQGFSLENALYAMSAVRVFTLGCVLFDQELQVAKEERETPTTASMPPLVRQAWELKDHQGAEPAFLFGLELIICGLEKQLKCESGS

SEQ ID NO: 62 - protein, 208 aa, Artificial Sequence
  synthetic construct; Sulfonylurea responsive repressor
MGSRLDKSKVINSALELLNEVGIEGLTTRKLAQKLGVEQPTLYWHVKNKRALLDALAIEMMDRHQTHYCPLEGESWQDFLRNTAKSMRCALLSHRDGAKVCLGTRWTEQMYESAENMLAFLCQQGFSLENALYAVSAVRVFTLGCVLFDQESQVAKEERETPTTASMPPLLRQGWELKDHQGAEPAFLFGLELIICGLEKQLKCESGS

SEQ ID NO: 63 - protein, 208 aa, Artificial Sequence
  synthetic construct; Sulfonylurea responsive repressor
MGSRLDKSKVINSALELLNEVGIEGLTTRKLAQKLGVEQPTLYWHVKNKRALLDALAIEMMDRHQTHYCPLEGESWQDFLRNNAKSMRCALLSHRDGAKVCLGTRWTEQQYESAENQLAFLCQQGFSLENALYAVSAVRVFTLGCVLFDQESQVAKEERETPTTASMPPLVRQAWELKDHQGAEPAFLFGLELIICGLEKQLKCESGS

SEQ ID NO: 64 - protein, 208 aa, Artificial Sequence
  synthetic construct; Sulfonylurea responsive repressor
MGSRLDKSKVINSALELLNEVGIEGLTTRKLAQKLGVEQPTLYWHVKNKRALLDALAIEMMDRHQTHYCPLEGESWQDFLRNNAKSMRCALLSHRDGAKVCLGTRWTEKLYETAENMLAFLCQQGFSLENALYAVSAVRVFTLGCVLFDQESQVAKEERETPTTASMPPLLRQVWELKDHQGAEPAFLFGLELIICGLEKQLKCESGS

SEQ ID NO: 65 - protein, 208 aa, Artificial Sequence
  synthetic construct; Sulfonylurea responsive repressor
MGSRLDKSKVINSALELLNEVGIEGLTTRKLAQKLGVEQPTLYWHVKNKRALLDALAIEMMDRHATHYCPLEGESWQDFLRNTAKSMRCALLSHRDGAKVCLGTRWTEQMYETAENMLAFLCQQGFSLENALYAMSAVRVFTLGCVLFDQELQVAKEERETPTTASMPPLVRQGWELKDHQGAEPAFLFGLELIICGLEKQLKCESGS

SEQ ID NO: 66 - protein, 208 aa, Artificial Sequence
  synthetic construct; Sulfonylurea responsive repressor
MGSRLDKSKVINSALELLNEVGIEGLTTRKLAQKLGVEQPTLYWHVKNKRALLDALAIEMMDRHQTHYCPLEGESWQDFLRNNAKSMRCALLSHRDGAKVCLGTRWTEQMYETAENQLAFLCQQGFSLENALYAMSAVRVFTLGCVLFDQELQVAKEERETPTTASMPPLLRQGWELKDHQGAEPAFLFGLELIICGLEKQLKCESGS

SEQ ID NO: 67 - protein, 208 aa, Artificial Sequence
  synthetic construct; Sulfonylurea responsive repressor
MGSRLDKSKVINSALELLNEVGIEGLTTRKLAQKLGVEQPTLYWHVKNKRALLDALAIEMMDRHATHYCPLEGESWQDFLRNTAKSMRCALLSHRDGAKVCLGTRWTEQQYEAAENQLAFLCQQGFSLENALYAVSAVRVFTLGCVLFDQESQVAKEERETPTTASMPPLLRQGWELKDHQGAEPAFLFGLELIICGLEKQLKCESGS

SEQ ID NO: 68 - protein, 208 aa, Artificial Sequence
  synthetic construct; Sulfonylurea responsive repressor
MGSRLDKSKVINSALELLNEVGIEGLTTRKLAQKLGVEQPTLYWHVKNKRALLDALAIEMMDRHQTHYCPLEGESWQDFLRNTAKSMRCALLSHRDGAKVWLGTRWTEQQYESAENMLAFLCQQGFSLENALYAVSAVRVFTLGCVLFDQELQVAKEERETPTTASMPPLVRQAWELKDHQGAEPAFLFGLELIICGLEKQLKCESGS

SEQ ID NO: 69 - protein, 208 aa, Artificial Sequence
  synthetic construct; Sulfonylurea responsive repressor
MGSRLDKSKVINSALELLNEVGIEGLTTRKLAQKLGVEQPTLYWHVKNKRALLDALAIEMMDRHQTHMCPLEGESWQDFLRNNAKSMRCALLSHRDGAKVCLGTRWTEKLYETAENQLAFLCQQGFSLENALYAVSAVRVFTLGCVLFDQESQVAKEERETPTTASMPPLVRQAWELKDHQGAEPAFLFGLELIICGLEKQLKCESGS

SEQ ID NO: 70 - protein, 208 aa, Artificial Sequence
  synthetic construct; Sulfonylurea responsive repressor
MGSRLDKSKVINSALELLNEVGIEGLTTRKLAQKLGVEQPTLYWHVKNKRALLDALAIEMMDRHQTHYCPLEGESWQDFLRNTAKSMRCALLSHRDGAKVCLGTRWTEKQYETAENMLAFLCQQGFSLENALYAMSAVRVFTLGCVLFDQESQVAKEERETPTTASMPPLVRQVWELKDHQGAEPAFLFGLELIICGLEKQLKCESGS

SEQ ID NO: 71 - protein, 208 aa, Artificial Sequence
  synthetic construct; Sulfonylurea responsive repressor
MGSRLDKSKVINSALELLNEVGIEGLTTRKLAQKLGVEQPTLYWHVKNKRALLDALAIEMMDRHQTHFCPLEGESWQDFLRNNAKSMRCALLSHRDGAKVCLGTRWTEQQYESAENQLAFLCQQGFSLENALYAVSAVRVFTLGCVLFDQELQVAKEERETPTTASMPPLLRQALELKDHQGAEPAFLFGLELIICGLEKQLKCESGS

SEQ ID NO: 72 - protein, 208 aa, Artificial Sequence
  synthetic construct; Sulfonylurea responsive repressor
MGSRLDKSKVINSALELLNEVGIEGLTTRKLAQKLGVEQPTLYWHVKNKRALLDALAIEMMDRHATHYCPLEGESWQDFLRNNAKSMRCALLSHRDGAKVCLGTRWTEKQYESAENMLAFLCQQGFSLENALYAVSAVRNFTLGCVLFDQESQVAKEERETPTTASMPPLLRQGWELKDHQGAEPAFLFGLELIICGLEKQLKCESGS

SEQ ID NO: 73 - protein, 208 aa, Artificial Sequence
  synthetic construct; Sulfonylurea responsive repressor
MGSRLDKSKVINSALELLNEVGIEGLTTRKLAQKLGVEQPTLYWHVKNKRALLDALAIEMMDRHATHMCPLEGESWQDFLRNNAKSMRCALLSHRDGAKVCLGTRWTEKHYESAENMLAFLCQQGFSLENALYAVSAVRVFTLGCVLFDQELQVAKEERETPTTASMPPLVRQVWELKDHQGAEPAFLFGLELIICGLEKQLKCESGS

SEQ ID NO: 74 - protein, 208 aa, Artificial Sequence
  synthetic construct; Sulfonylurea responsive repressor
  MISC_FEATURE (65)..(65): Xaa = any amino acid
  MISC_FEATURE (117)..(117): Xaa = any amino acid
MGSRLDKSKVINSALELLNEVGIEGLTTRKLAQKLGVEQPTLYWHVKNKRALLDALAIEMMDRHXTHLCPLEGESWQDFLRNTAKSMRCALLSHRDGAKVCLGTRWTEQLYEAAENXLAFLCQQGFSLENALYAMSAVRVFTLGCVLFDQESQVAKEERETPTTASMPPLVRQVWELKDHQGAEPAFLFGLELIICGLEKQLKCESGS

SEQ ID NO: 75 - protein, 208 aa, Artificial Sequence
  synthetic construct; Sulfonylurea responsive repressor
MGSRLDKSKVINSALELLNEVGIEGLTTRKLAQKLGVEQPTLYWHVKNKRALLDALAIEMMDRHQTHYCPLEGESWQDFLRNNAKSMRCALLSHRDGAKVCLGTRWTEQHYEGAENMLAFLCQQGFSLENALYAVSAVRVFTLGCVLFDQESQVAKEERETPTTASMPPLLRQVWELKDHQGAEPAFLFGLELIICGLEKQLKCESGS

SEQ ID NO: 76 - protein, 208 aa, Artificial Sequence
  synthetic construct; Sulfonylurea responsive repressor
MGSRLDKSKVINSALELLNEVGIEGLTTRKLAQKLGVEQPTLYWHVKNKRALLDALAIEMMDRHATHICPLEGESWQDFLRNNAKSMRCALLSHRDGAKVCLGTRWTEQLYESAENMLAFLCQQGFSLENALYAVSAVRVFTLGCVLFDQESQVAKEERETPTTASMPPLVRQVWELKDHQGAEPAFLFGLELIICGLEKQLKCESGS

SEQ ID NO: 77 - protein, 208 aa, Artificial Sequence
  synthetic construct; Sulfonylurea responsive repressor
MGSRLDKSKVINSALELLNEVGIEGLTTRKLAQKLGVEQPTLYWHVKNKRALLDALAIEMMDRHQTHYCPLEGESWQDFLRNNAKSMRCALLSHRDGAKVCLGTRWTEKQYETAENQLAFLCQQGFSLENALYAMSAVRNFTLGCVLFDQESQVAKEERETPTTASMPPLLRQGWELKDHQGAEPAFLFGLELIICGLEKQLKCESGS

SEQ ID NO: 78 - protein, 208 aa, Artificial Sequence
  synthetic construct; Sulfonylurea responsive repressor
MGSRLDKSKVINSALELLNEVGIEGLTTRKLAQKLGVEQPTLYWHVKNKRALLDALAIEMMDRHQTHYCPLEGESWQDFLRNNAKSMRCALLSHRDGAKVCLGTRWTEQHYETAENMLAFLCQQGFSLENALYAMSAVRVFTLGCVLFDQESQVAKEERETPTTASMPPLLRQGWELKDHQGAEPAFLFGLELIICGLEKQLKCESGS

SEQ ID NO: 79 - protein, 208 aa, Artificial Sequence
  synthetic construct; Sulfonylurea responsive repressor
  MISC_FEATURE (110)..(110): Xaa = any amino acid
  MISC_FEATURE (113)..(113): Xaa = any amino acid
  MISC_FEATURE (117)..(117): Xaa = any amino acid
  MISC_FEATURE (135)..(135): Xaa = any amino acid
  MISC_FEATURE (140)..(140): Xaa = any amino acid
MGSRLDKSKVINSALELLNEVGIEGLTTRKLAQKLGVEQPTLYWHVKNKRALLDALAIEMMDRHPTHLCPLEGESWQDFLRNTAKSMRCALLSHRDGAKVCLGTRWTEQXYEXAENXLAFLCQQGFSLENALYAXSAVRXFTLGCVLFDQEIQVAKEERETPTTASMPPLVRQAWELKDHQGAEPAFLFGLELIICGLEKQLKCESGS

SEQ ID NO: 80 - protein, 208 aa, Artificial Sequence
  synthetic construct; Sulfonylurea responsive repressor
MGSRLDKSKVINSALELLNEVGIEGLTTRKLAQKLGVEQPTLYWHVKNKRALLDALAIEMMDRHATHICPLEGESWQDFLRNNAKSMRCALLSHRDGAKVCLGTRWTEQMYETAENQLAFLCQQGFSLENALYAMSAVRVFTLGCVLFDQELQVAKEERETPTTASMPPLLRQVWELKDHQGAEPAFLFGLELIICGLEKQLKCESGS

SEQ ID NO: 81 - protein, 208 aa, Artificial Sequence
  synthetic construct; Sulfonylurea responsive repressor
MGSRLDKSKVINSALELLNEVGIEGLTTRKLAQKLGVEQPTLYWHVKNKRALLDALAIEMMDRHQTHICPLEGESWQDFLRNNAKSMRCALLSHRDGAKVCLGTRWTEKHYETAENMLAFLCQQGFSLENALYAMSAVRVFTLGCVLFDQESQVAKEERETPTTASMPPLVRQVWELKDHQGAEPAFLFGLELIICGLEKQLKCESGS

SEQ ID NO: 82 - protein, 208 aa, Artificial Sequence
  synthetic construct; Sulfonylurea responsive repressor
MGSRLDKSKVINSALELLNEVGIEGLTTRKLAQKLGVEQPTLYWHVKNKRALLDALAIEMMDRHQTHVCPLEGESWQDFLRNTAKSMRCALLSHRDGAKVCLGTRWTEQLYETAENMLAFLCQQGFSLENALYAVSAVRVFTLGCVLFDQESQVAKEERETPTTARMPPLLRQGWELKDHQGAEPAFLFGLELIICGLEKQLKCESGS

SEQ ID NO: 83 - protein, 208 aa, Artificial Sequence
  synthetic construct; Sulfonylurea responsive repressor
MGSRLDKSKVINSALELLNEVGIEGLTTRKLAQKLGVEQPTLYWHVKNKRALLDALAIEMMDRHQTHYCPLEGESWQDFLRNTAKSMRCALLSHRDGAKVCLGTRWTEQLYESAENMLAFLCQQGFSLENALYAMSAVRVFTLGCVLFDQELQVAKEERETPTTASMPPLLRQGWELKDHQGAEPAFLFGLELIICGLEKQLKCESGS

SEQ ID NO: 84 - protein, 208 aa, Artificial Sequence
  synthetic construct; Sulfonylurea responsive repressor
MGSRLDKSKVINSALELLNEVGIEGLTTRKLAQKLGVEQPTLYWHVKNKRALLDALAIEMMDRHQTHYCPLEGESWQDFLRNTAKSMRCALLSHRDGAKVCLGTRWTEKQYETAENQLAFLCQQGFSLENALYAVSAVRVFTLGCVLFDQESQVAKEERETPTTASMPPLVRQVWELKDHQGAEPAFLFGLELIICGLEKQLKCESGS

SEQ ID NO: 85 - protein, 208 aa, Artificial Sequence
  synthetic construct; Sulfonylurea responsive repressor
MGSRLDKSKVINSALELLNEVGIEGLTTRKLAQKLGVEQPTLYWHVKNKRALLDALAIEMMDRHATHYCPLEGESWQDFLRNNAKSMRCALLSHRDGAKVCLGTRWTEQHYETAENQLAFLCQQGFSLENALYAMSAVRVFTLGCVLFDQESQVAKEERETPTTASMPPLVRQGWELKDHQGAEPAFLFGLELIICGLEKQLKCESGS

SEQ ID NO: 86 - protein, 208 aa, Artificial Sequence
  synthetic construct; Sulfonylurea responsive repressor
MGSRLDKSKVINSALELLNEVGIEGLTTRKLAQKLGVEQPTLYWHVKNKRALLDALAIEMMDRHQTHYCPLEGESWQDFLRNNAKSMRCALLSHRDGAKVCLGTRWTEKHYETAENQLAFLCQQGFSLENALYAMSAVRVFTLGCVLFDQESQVAKEERETPTTASMPPLLRQAWELKDHQGAEPAFLFGLELIICGLEKQLKCESGS

SEQ ID NO: 87 - protein, 208 aa, Artificial Sequence
  synthetic construct; Sulfonylurea responsive repressor
MGSRLDKSKVINSALELLNEVGIEGLTTRKLAQKLGVEQPTLYWHVKNKRALLDALAIEMMDRHQTHYCPLEGESWQDFLRNNAKSMRCALLSHRDGAKVCLGTRWTEQHYEAAENMLAFLCQQGFSLENALYAVSAVRVFTLGCVLFDQESQVAKEERETPTTASMPPLLRQVWELKDHQGAEPAFLFGLELIICGLEKQLKCESGS

SEQ ID NO: 88 - protein, 208 aa, Artificial Sequence
  synthetic construct; Sulfonylurea responsive repressor
MGSRLDKSKVINSALELLNEVGIEGLTTRKLAQKLGVEQPTLYWHVKNKRALLDALAIEMMDRHQTHYCPLEGESWQDFLRNNAKSMRCALLSHRDGAKVCLGTRWTEQMYEAAENQLAFLCQQGFSLENALYAVSAVRVFTLGCVLFDQELQVAKEERETPTTASMPPLVRQVWELKDHQGAEPAFLFGLELIICGLEKQLKCESGS

SEQ ID NO: 89 - protein, 208 aa, Artificial Sequence
  synthetic construct; Sulfonylurea responsive repressor
MGSRLDKSKVINSALELLNEVGIEGLTTRKLAQKLGVEQPTLYWHVKNKRALLDALAIEMMDRHQTHYCPLEGESWQDFLRNNAKSMRCALLSHRDGAKVCLGTRWTEKLYEAAENMLAFLCQQGFSLENALYAVSAVRVFTLGCVLFDQESQVAKEERETPTTASMPPLVRQVWELKDHQGAEPAFLFGLELIICGLEKQLKCESGS

SEQ ID NO: 90 - protein, 208 aa, Artificial Sequence
  synthetic construct; Sulfonylurea responsive repressor
  MISC_FEATURE (140)..(140): Xaa = any amino acid
MGSRLDKSKVINSALELLNEVGIEGLTTRKLAQKLGVEQPTLYWHVKNKRALLDALAIEMMDRHQTHYCPLEGESWQDFLRNTAKSMRCALLSHRDGAKVCLGTRWTEQMYEAAENMLAFLCQQGFSLENALYAMSAVRXFTLGCVLFDQESQVAKEERETPTTASMPPLVRQAWELKDHQGAEPAFLFGLELIICGLEKQLKCESGS

SEQ ID NO: 91 - protein, 208 aa, Artificial Sequence
  synthetic construct; Sulfonylurea responsive repressor
  MISC_FEATURE (113)..(113): Xaa = any amino acid
  MISC_FEATURE (140)..(140): Xaa = any amino acid
MGSRLDKSKVINSALELLNEVGIEGLTTRKLAQKLGVEQPTLYWHVKNKRALLDALAIEMMDRHATHYCPLEGESWQDFLRNNAKSMRCALLSHRDGAKVCLGTRWTEQLYEXAENQLAFLCQQGFSLENALYAMSAVRXFTLGCVLFDQESQVAKEERETPTTASMPPLVRQGWELKDHQGAEPAFLFGLELIICGLEKQLKCESGS

SEQ ID NO: 92 - protein, 208 aa, Artificial Sequence
  synthetic construct; Sulfonylurea responsive repressor
MGSRLDKSKVINSALELLNEVGIEGLTTRKLAQKLGVEQPTLYWHVKNKRALLDALAIEMMDRHQTHYCPLEGESWQDFLRNTAKSMRCALLSHRDGAKVCLGTRWTEKQYESAENQLAFLCQQGFSLENALYAMSAVRVFTLGCVLFDQESQVAKEERETPTTASMPPLVRQGWELKDHQGAEPAFLFGLELIICGLEKQLKCESGS

SEQ ID NO: 93 - protein, 208 aa, Artificial Sequence
  synthetic construct; Sulfonylurea responsive repressor
MGSRLDKSKVINSALELLNEVGIEGLTTRKLAQKLGVEQPTLYWHVKNKRALLDALAIEMMDRHQTHYCPLEGESWQDFLRNNAKSMRCALLSHRDGAKVCLGTRWTEQHYEAAENQLAFLCQQGFSLENALYAVSAVRVFTLGCVLFDQESQVAKEERETPTTASMPPLVRQVWELKDHQGAEPAFLFGLELIICGLEKQLKCESGS

SEQ ID NO: 94 - protein, 208 aa, Artificial Sequence
  synthetic construct; Sulfonylurea responsive repressor
MGSRLDKSKVINSALELLNEVGIEGLTTRKLAQKLGVEQPTLYWHVKNKRALLDALAIEMMDRHATHYCPLEGESWQDFLRNTAKSMRCALLSHRDGAKVCLGTRWTEQHYESAENMLAFLCQQGFSLENALYAVSAVRVFTLGCVLFDQESQVAKEERETPTTASMPPLVRQAWELKVHQGAEPAFLFGLELIICGLEKQLKCESGS

SEQ ID NO: 95 - protein, 208 aa, Artificial Sequence
  synthetic construct; Sulfonylurea responsive repressor
MGSRLDKSKVINSALELLNEVGIEGLTTRKLAQKLGVEQPTLYWHVKNKRALLDALAIEMMDRHATHYCPLEGESWQDFLRNNAKSMRCALLSHRDGAKVCLGTRWTEQHYESAENQLAFLCQQGFSLENALYAVSAVRVFTLGCVLFDQELQVAKEERETPTTASMPPLLRQVWELKDHQGAEPAFLFGLELIICGLEKQLKCESGS

SEQ ID NO: 96 - protein, 208 aa, Artificial Sequence
  synthetic construct; Sulfonylurea responsive repressor
MGSRLDKSKVINSALELLNEVGIEGLTTRKLAQKLGVEQPTLYWHVKNKRALLDALAIEMMDRHATHYCPLEGESWQDFLRNTAKSMRCALLSHRDGAKVCLGTRWTEKQYEAAENQLAFLCQQGFSLENALYAVSAVGNFTLGCVLFDQELQVAKEERETPTTASMPPLVRQALELKDHQGAEPAFLFGLELIICGLEKQLKCESGS

SEQ ID NO: 97 - protein, 208 aa, Artificial Sequence
  synthetic construct; Sulfonylurea responsive repressor
MGSRLDKSKVINSALELLNEVGIEGLTTRKLAQKLGVEQPTLYWHVKNKRALLDALAIEMMDRHATHYCPLEGESWQDFLRNTAKSMRCALLSHRDGAKVCLGTRWTEQQYETAENQLAFLCQQGFSLENALYAMSAVRNFTLGCVLFDQESQVAKEERETPTTASMPPLLRQAWELKDHQGAEPAFLFGLELIICGLEKQLKCESGS

SEQ ID NO: 98 - protein, 208 aa, Artificial Sequence
  synthetic construct; Sulfonylurea responsive repressor
  MISC_FEATURE (67)..(67): Xaa = any amino acid
  MISC_FEATURE (105)..(105): Xaa = any amino acid
  MISC_FEATURE (123)..(123): Xaa = any amino acid
  MISC_FEATURE (138)..(138): Xaa = any amino acid
  MISC_FEATURE (146)..(146): Xaa = any amino acid
  MISC_FEATURE (153)..(153): Xaa = any amino acid
  MISC_FEATURE (181)..(181): Xaa = any amino acid
MGSRLDKSKVINSALELLNEVGIEGLTTRKLAQKLGVEQPTLYWHVKNKRALLDALAIEMMDRHATXYCPLEGESWQDFLRNNAKSMRCALLSHRDGAKVCLGTXWTEKHYETAENQLAFLCXQGFSLENALYAMSAXRVFTLGCXLFDQELXVAKEERETPTTASMPPLLRQGWELKDHXGAEPAFLFGLELIICGLEKQLKCESGS

SEQ ID NO: 99 - protein, 208 aa, Artificial Sequence
  synthetic construct; Sulfonylurea responsive repressor
  MISC_FEATURE (105)..(105): Xaa = any amino acid
MGSRLDKSKVINSALELLNEVGIEGLTTRKLAQKLGVEQPTLYWHVKNKRALLDALAIEMMDRHQTHLCPLEGESWQDFLRNTAKSMRCALLSHRDGAKVCLGTXWTEKMYESAENMLAFLCQQGFSLENALYAVSAVRVFTLGCVLFDQELQVAKEERETPTTASMPPLLRQVWELKDHQGAEPAFLFGLELIICGLEKQLKCESGS

SEQ ID NO: 100 - protein, 208 aa, Artificial Sequence
  synthetic construct; Sulfonylurea responsive repressor
  MISC_FEATURE (164)..(164): Xaa = any amino acid
  MISC_FEATURE (165)..(165): Xaa = any amino acid
  MISC_FEATURE (168)..(168): Xaa = any amino acid
MGSRLDKSKVINSALELLNEVGIEGLTTRKLAQKLGVEQPTLYWHVKNKRALLDALAIEMMDRHQTHMCPLEGESWQDFLRNNAKSMRCALLSHRDGAKVCLGTRWTEKMYESAENMLAFLCQQGFSLENALYAMSAVRVFTLGCVLFDQESQVAKEERETPTXXSMXPLVRQAWELKDHQGAEPAFLFGLELIICGLEKQLKCESGS

SEQ ID NO: 101 - protein, 208 aa, Artificial Sequence
  synthetic construct; Sulfonylurea responsive repressor
MGSRLDKSKVINSALELLNEVGIEGLTTRKLAQKLGVEQPTLYWHVKNKRALLDALAIEMMDRHATHICPLEGESWQDFLRNTAKSMRCALLSHRDGAKVCLGTRWTEQHYESAENQLAFLCQQGFSLENALYAVSAVRVFTLGCVLFDQESQVAKEERETPTTASMPPLLRQVWELKDHQGAEPAFLFGLELIICGLEKQLKCESGS

SEQ ID NO: 102 - protein, 208 aa, Artificial Sequence
  synthetic construct; Sulfonylurea responsive repressor
  MISC_FEATURE (101)..(101): Xaa = any amino acid
  MISC_FEATURE (110)..(110): Xaa = any amino acid
  MISC_FEATURE (113)..(113): Xaa = any amino acid
  MISC_FEATURE (135)..(135): Xaa = any amino acid
  MISC_FEATURE (171)..(171): Xaa = any amino acid
  MISC_FEATURE (174)..(174): Xaa = any amino acid
MGSRLDKSKVINSALELLNEVGIEGLTTRKLAQKLGVEQPTLYWHVKNKRALLDALAIEMMDRHQTHYCPLEGESWQDFLRNTAKSMRCALLSHRDGAKVXLGTRWTEKXYEXAENQLAFLCQQGFSLENALYAXSAVRVFTLGCVLFDQESQVAKEERETPTTASMPPLXRQXWELKDHQGAEPAFLFGLELIICGLEKQLKCESGS

SEQ ID NO: 103 - protein, 208 aa, Artificial Sequence
  synthetic construct; Sulfonylurea responsive repressor
  MISC_FEATURE (65)..(65): Xaa = any amino acid
  MISC_FEATURE (68)..(68): Xaa = any amino acid
  MISC_FEATURE (140)..(140): Xaa = any amino acid
  MISC_FEATURE (167)..(167): Xaa = any amino acid
  MISC_FEATURE (174)..(174): Xaa = any amino acid
MGSRLDKSKVINSALELLNEVGIEGLTTRKLAQKLGVEQPTLYWHVKNKRALLDALAIEMMDRHXTHXCPLEGESWQDFLRNTAKSMRCALLSHRDGAKVCLGTRWTEQHYEAAENLLAFLCQQGFSLENALYAMSAVRXFTLGCVLFDQELQVAKEERETPTTASXPPLVRQXWELKDHQGAEPAFLFGLELIICGLEKQLKCESGS

SEQ ID NO: 104 - protein, 208 aa, Artificial Sequence
  synthetic construct; Sulfonylurea responsive repressor
MGSRLDKSKVINSALELLNEVGIEGLTTRKLAQKLGVEQPTLYWHVKNKRALLDALAIEMMDRHATHVCPLEGESWQDFLRNNAKSMRCALLSHRDGAKVCLGTRWTEQQYETAENMLAFLCQQGFSLENALYAVSAVRNFTLGCVLFDQESQVAKEERETPTTASMPPLLRQGWELKDHQGAEPAFLFGLELIICGLEKQLKCESGS

SEQ ID NO: 105 - protein, 208 aa, Artificial Sequence
  synthetic construct; Sulfonylurea responsive repressor
MGSRLDKSKVINSALELLNEVGIEGLTTRKLAQKLGVEQPTLYWHVKNKRALLDALAIEMMDRHATHYCPLEGESWQDFLRNNAKSMRCALLSHRDGAKVCLGTRWTEQHYETAENMLAFLCQQGFSLENALYAVSAVRNFTLGCVLFDQELQVAKEERETPTTASMPPLVRQAWELKDHQGAEPAFLFGLELIICGLEKQLKCESGS

SEQ ID NO: 106 - protein, 208 aa, Artificial Sequence
  synthetic construct; Sulfonylurea responsive repressor
MGSRLDKSKVINSALELLNEVGIEGLTTRKLAQKLGVEQPTLYWHVKNKRALLDALAIEMMDRHQTHFCPLEGESWQDFLRNNAKSMRCALLSHRDGAKVCLGTRWTEQMYETAENMLAFLCQQGFSLENALYAMSAVRVFTLGCVLFDQESQVAKEERETPTTASMPPLVRQGWELKDHQGAEPAFLFGLELIICGLEKQLKCESGS

SEQ ID NO: 107 - protein, 208 aa, Artificial Sequence
  synthetic construct; Sulfonylurea responsive repressor
  MISC_FEATURE (156)..(156): Xaa = any amino acid
  MISC_FEATURE (163)..(163): Xaa = any amino acid
  MISC_FEATURE (167)..(167): Xaa = any amino acid
MGSRLDKSKVINSALELLNEVGIEGLTTRKLAQKLGVEQPTLYWHVKNKRALLDALAIEMMDRHATDYCPLEGESWQDFLRNNAKSMRCALLSHRDGAKVCLGTRWTEKQYETAENMLAFLCQQGFSLENALYAVSAVRVFTLGCVLFDQESQVAXEERETPXTASXPPLVRQVWELKDHQGAEPAFLFGLELIICGLEKQLKCESGS

SEQ ID NO: 108 - protein, 208 aa, Artificial Sequence
  synthetic construct; Sulfonylurea responsive repressor
MGSRLDKSKVINSALELLNEVGIEGLTTRKLAQKLGVEQPTLYWHVKNKRALLDALAIEMMDRHQTHYCPLEGESWQDFLRNNAKSMRCALLSHRDGAKVCLGTRWTEQLYETAENQLAFLCQQGFSLENALYAMSAVRVFTLGCVLFDQESQVAKEERETPTTASMPPLVRQAWELKDHQGAEPAFLFGLELIICGLEKQLKCESGS

SEQ ID NO: 109 - protein, 208 aa, Artificial Sequence
  synthetic construct; Sulfonylurea responsive repressor
  MISC_FEATURE (134)..(134): Xaa = any amino acid
MGSRLDKSKVINSALELLNEVGIEGLTTRKLAQKLGVEQPTLYWHVKNKRALLDALAIEMMDRHQTHVCPLEGESWQDFLRNNAKSMRCALLSHRDGAKVCLGTRWTEQHYEAAENMLAFLCQQGFSLENALYXMSAVRVFTLGCVLFDQELQVAKEERETPTTASMPPLVRQAWELKDHQGAEPAFLFGLELIICGLEKQLKCESGS

SEQ ID NO: 110 - protein, 208 aa, Artificial Sequence
  synthetic construct; Sulfonylurea responsive repressor
MGSRLDKSKVINSALELLNEVGIEGLTTRKLAQKLGVEQPTLYWHVKNKRALLDALAIEMMDRHQTHFCPLEGESWQDFLRNNAKSMRCALLSHRDGAKVCLGTRWTEQQYESAENQLAFLCQQGFSLENALYAMSAVRVFTLGCVLFDQESQVAKEERETPTTASMPPLLRQGLELKDHQGAEPAFLFGLELIICGLEKQLKCESGS

SEQ ID NO: 111 - protein, 208 aa, Artificial Sequence
  synthetic construct; Sulfonylurea responsive repressor
MGSRLDKSKVINSALELLNEVGIEGLTTRKLAQKLGVEQPTLYWHVKNKRALLDALAIEMMDRHQTHLCPLEGESWQDFLRNNAKSMRCALLSHRDGAKVCLGTRWTEQLYETAENMLAFLCQQGFSLENALYAMSAVRVFTLGCVLFDQESQVAKEERETPTTASMPPLLRQGWELKDHQGAEPAFLFGLELIICGLEKQLKCESGS

SEQ ID NO: 112 - protein, 208 aa, Artificial Sequence
  synthetic construct; Sulfonylurea responsive repressor
MGSRLDKSKVINSALELLNEVGIEGLTTRKLAQKLGVEQPTLYWHVKNKRALLDALAIEMMDRHQTHYCPLEGESWQDFLRNTAKSMRCALLSHRDGAKVCLGTRWTEKLYETAENMLAFLCQQGFSLENALYAMSAVRVFTLGCVLFDQESQVAKEERETPTTASMPPLLRQAWELKDHQGAEPAFLFGLELIICGLEKQLKCESGS

SEQ ID NO: 113 - protein, 208 aa, Artificial Sequence
  synthetic construct; Sulfonylurea responsive repressor
MGSRLDKSKVINSALELLNEVGIEGLTTRKLAQKLGVEQPTLYWHVKNKRALLDALAIEMMDRHQTHYCPLEGESWQDFLRNNAKSMRCALLSHRDGAKVCLGTRWTEKQYETAENMLAFLCQQGFSLENALYAMSAVRVFTLGCVLFDQELQVAKEERETPTTASMPPLLRQVWELKDHQGAEPAFLFGLELIICGLEKQLKCESGS

SEQ ID NO: 114 - protein, 208 aa, Artificial Sequence
  synthetic construct; Sulfonylurea responsive repressor
MGSRLDKSKVINSALELLNEVGIEGLTTRKLAQKLGVEQPTLYWHVKNKRALLDALAIEMMDRHQTHYCPLEGESWQDFLRNTAKSMRCALLSHRDGAKVCLGTRWTEQMYESAENQLAFLCQQGFSLENALYAVSAVRVFTLGCVLFDQELQVAKEERETPTTASMPPLLRQAWELKDHQGAEPAFLFGLELIICGLEKQLKCESGS

SEQ ID NO: 115 - protein, 208 aa, Artificial Sequence
  synthetic construct; Sulfonylurea responsive repressor
MGSRLDKSKVINSALELLNEVGIEGLTTRKLAQKLGVEQPTLYWHVKNKRALLDALAIEMMDRHQTHYCPLEGESWQDFLRNTAKSMRCALLSHRDGAKVCLGTRWTEKQYETAENMLAFLCQQGFSLENALYAMSAVRVFTLGCVLFDQESQVAKEERETPTTASMPPLLRQGWELKDHQGAEPAFLFGLELIICGLEKQLKCESGS

SEQ ID NO: 116 - protein, 208 aa, Artificial Sequence; identical to SEQ ID NO: 88
  synthetic construct; Sulfonylurea responsive repressor

SEQ ID NO: 117 - protein, 208 aa, Artificial Sequence
  synthetic construct; Sulfonylurea responsive repressor
MGSRLDKSKVINSALELLNEVGIEGLTTRKLAQKLGVEQPTLYWHVKNKRALLDALAIEMMDRHQTHYCPLEGESWQDFLRNNAKSMRCALLSHRDGAKVCLGTRWTEKQYESAENMLAFLCQQGFSLENALYAVSAVRVFTLGCVLFDQESQVAKEERETPTTASMPPLLRQAWELKDHQGAEPAFLFGLELIICGLEKQLKCESGS

SEQ ID NO: 118 - protein, 208 aa, Artificial Sequence
  synthetic construct; Sulfonylurea responsive repressor
MGSRLDKSKVINSALELLNEVGIEGLTTRKLAQKLGVEQPTLYWHVKNKRALLDALAIEMMDRHQTHLCPLEGESWQDFLRNNAKSMRCALLSHRDGAKVCLGTRWTEQLYESAENQLAFLCQQGFSLENALYAVSAVRVFTLGCVLFDQESQVAKEERETPTTASMPPLLRQAWELKDHQGAEPAFLFGLELIICGLEKQLKCESGS

SEQ ID NO: 119 - protein, 208 aa, Artificial Sequence
  synthetic construct; Sulfonylurea responsive repressor
MGSRLDKSKVINSALELLNEVGIEGLTTRKLAQKLGVEQPTLYWHVKNKRALLDALAIEMMDRHATHLCPLEGESWQDFLRNNAKSMRCALLSHRDGAKVCLGTRWTEKQYETAENMLAFLCQQGFSLENALYAVSAVRVFTLGCVLFDQESQVAKEERETPTTASMPPLLRQVWELKDHQGAEPAFLFGLELIICGLEKQLKCESGS

SEQ ID NO: 120 - protein, 208 aa, Artificial Sequence
  synthetic construct; Sulfonylurea responsive repressor
  misc_feature (165)..(165): Xaa can be any naturally occurring amino acid
  MISC_FEATURE (167)..(167): Xaa = any amino acid
MGSRLDKSKVINSALELLNEVGIEGLTTRKLAQKLGVEQPTLYWHVKNKRALLDALAIEMMDRHATHFCPLEGESWQDFLRNNAKSMRCALLSHRDGAKVCVGTRWTEQMYEAAENQLAFLCQQGFSLENALYAVSAVRVFTLGCVLFDQELQVAKEERETPTTXSXPPLVRQAWELKDHQGAEPAFLFGLELIICGLEKQLKCESGS

SEQ ID NO: 121 - protein, 208 aa, Artificial Sequence
  synthetic construct; Sulfonylurea responsive repressor
MGSRLDKSKVINSALELLNEVGIEGLTTRKLAQKLGVEQPTLYWHVKNKRALLDALAIEMMDRHQTHICPLEGESWQDFLRNNAKSMRCALLSHRDGAKVCVGTRWTEKHYESAENMLAFLCQQGFSLENALYAVSAVRVFTLGCVLFDQESQVAKEERETPTTASMPPLLRQAWELKDHQGAEPAFLFGLELIICGLEKQLKCESGS

SEQ ID NO: 122 - protein, 208 aa, Artificial Sequence
  synthetic construct; Sulfonylurea responsive repressor
  MISC_FEATURE (101)..(101): Xaa = any amino acid
  MISC_FEATURE (117)..(117): Xaa = any amino acid
  MISC_FEATURE (140)..(140): Xaa = any amino acid
  MISC_FEATURE (152)..(152): Xaa = any amino acid
  MISC_FEATURE (175)..(175): Xaa = any amino acid
MGSRLDKSKVINSALELLNEVGIEGLTTRKLAQKLGVEQPTLYWHVKNKRALLDALAIEMMDRHATHFCPLEGESWQDFLRNNAKSMRCALLSHRDGAKVXLGTRWTEQLYETAENXLAFLCQQGFSLENALYAMSAVRXFTLGCVLFDQEXQVAKEERETPTTASMPPLLRQVXELKDHQGAEPAFLFGLELIICGLEKQLKCESGS

SEQ ID NO: 123 - protein, 208 aa, Artificial Sequence
  synthetic construct; Sulfonylurea responsive repressor
MGSRLDKSKVINSALELLNEVGIEGLTTRKLAQKLGVEQPTLYWHVKNKRALLDALAIEMMDRHATHVCPLEGESWQDFLRNTAKSMRCALLSHRDGAKVCLGTRWTEQHYETAENMLAFLCQQGFSLENALYAMSAVRVFTLGCVLFDQESQVAKEERETPTTASMPPLLRQVWELKDHQGAEPAFLFGLELIICGLEKQLKCESGS

SEQ ID NO: 124 - protein, 208 aa, Artificial Sequence
  synthetic construct; Sulfonylurea responsive repressor
  MISC_FEATURE (68)..(68): Xaa = any amino acid
  MISC_FEATURE (140)..(140): Xaa = any amino acid
  MISC_FEATURE (171)..(171): Xaa = any amino acid
MGSRLDKSKVINSALELLNEVGIEGLTTRKLAQKLGVEQPTLYWHVKNKRALLDALAIEMMDRHPTHXCPLEGESWQDFLRNTAKSMRCALLSHRDGAKVCLGTRWTEQLYETAENMLAFLCQQGFSLENALYAMSAVRXFTLGCVLFDQEIQVAKEERETPTTASMPPLXRQAWELKDHQGAEPAFLFGLELIICGLEKQLKCESGS

SEQ ID NO: 125 - protein, 208 aa, Artificial Sequence
  synthetic construct; Sulfonylurea responsive repressor
  MISC_FEATURE (135)..(135): Xaa = any amino acid
  MISC_FEATURE (152)..(152): Xaa = any amino acid
  MISC_FEATURE (171)..(171): Xaa = any amino acid
  MISC_FEATURE (174)..(174): Xaa = any amino acid
MGSRLDKSKVINSALELLNEVGIEGLTTRKLAQKLGVEQPTLYWHVKNKRALLDALAIEMMDRHATHYCPLEGESWQDFLRNTAKSMRCALLSHRDGAKVCLGTRWTEKLYETAENMLAFLCQQGFSLENALYAXSAVRVFTLGCVLFDQEXQVAKEERETPTTASMPPLXRQXWELKDHQGAEPAFLFGLELIICGLEKQLKCESGS

SEQ ID NO: 126 - protein, 208 aa, Artificial Sequence
  synthetic construct; Sulfonylurea responsive repressor
  MISC_FEATURE (151)..(151): Xaa = any amino acid
  MISC_FEATURE (164)..(164): Xaa = any amino acid
  MISC_FEATURE (168)..(168): Xaa = any amino acid
MGSRLDKSKVINSALELLNEVGIEGLTTRKLAQKLGVEQPTLYWHVKNKRALLDALAIEMMDRHATHLCPLEGESWQDFLRNTAKSMRCALLSHRDGAKVCLGTRWTEQLYETAENMLAFLCQQGFSLENALYAVSAVRVFTLGCVLFDQXLQVAKEERETPTXASMXPLVRQGWELKDHQGAEPAFLFGLELIICGLEKQLKCESGS

SEQ ID NO: 127 - protein, 208 aa, Artificial Sequence
  synthetic construct; Sulfonylurea responsive repressor
  MISC_FEATURE (140)..(140): Xaa = any amino acid
  MISC_FEATURE (152)..(152): Xaa = any amino acid
MGSRLDKSKVINSALELLNEVGIEGLTTRKLAQKLGVEQPTLYWHVKNKRALLDALAIEMMDRHQTHYCPLEGESWQDFLRNNAKSMRCALLSHRDGAKVWLGTRWTEQLYEAAENLLAFLCQQGFSLENALYAVSAVRXFTLGCVLFDQEXQVAKEERETPTTASMPPLLRQAWELKDHQGAEPAFLFGLELIICGLEKQLKCESGS

SEQ ID NO: 128 - protein, 208 aa, Artificial Sequence
  synthetic construct; Sulfonylurea responsive repressor
  MISC_FEATURE (167)..(167): Xaa = any amino acid
MGSRLDKSKVINSALELLNEVGIEGLTTRKLAQKLGVEQPTLYWHVKNKRALLDALAIEMMDRHQTHYCPLEGESWQDFLRNNAKSMRCALLSNRDGAKVCLGTRWTEKLYEAAENQLAFLCQQGFSLENALYAVSAVRVFTLGCVLFDQELQVAKEERETPTTASXPPLVRQAWELKDHQGAEPAFLFGLELIICGLEKQLKCESGS

SEQ ID NO: 129 - protein, 208 aa, Artificial Sequence
  synthetic construct; Sulfonylurea responsive repressor
MGSRLDKSKVINSALELLNEVGIEGLTTRKLAQKLGVEQPTLYWHVKNKRALLDALAIEMMDRHATHYCPLEGESWQDFLRNTAKSMRCALLSHRDGAKVCLGTRWTEQLYETAENQLAFLCQQGFSLENALYAVSAVRVFTLGCVLFDQELQVAKEERETPTTASMPPLLRQAWELKDHQGAEPAFLFGLELIICGLEKQLKCESGS

SEQ ID NO: 130 - protein, 208 aa, Artificial Sequence
  synthetic construct; Sulfonylurea responsive repressor
MGSRLDKSKVINSALELLNEVGIEGLTTRKLAQKLGVEQPTLYWHVKNKRALLDALAIEMMDRHQTHYCPLEGESWQDFLRNNAKSMRCALLSHRDGAKVCLGTRWTEKHYEGAENQLAFLCQQGFSLENALYAMSAVRVFTLGCVLFDQESQVAKEERETPTTASMPPLVRQVWELKDHQGAEPAFLFGLELIICGLEKQLKCESGS

SEQ ID NO: 131 - protein, 208 aa, Artificial Sequence
  synthetic construct; Sulfonylurea responsive repressor
MGSRLDKSKVINSALELLNEVGIEGLTTRKLAQKLGVEQPTLYWHVKNKRALLDALAIEMMDRHQTHMCPLEGESWQDFLRNNAKSMRCALLSHRDGAKVCLGTRWTEKHYETAENQLAFLCQQGFSLENALYAVSAVRVFTLGCVLFDQELQVAKEERETPTTASMPPLVRQAWELKDHQGAEPAFLFGLELIICGLEKQLKCESGS

SEQ ID NO: 132 - protein, 208 aa, Artificial Sequence
  synthetic construct; Sulfonylurea responsive repressor
MGSRLDKSKVINSALELLNEVGIEGLTTRKLAQKLGVEQPTLYWHVKNKRALLDALAIEMMDRHATHLCPLEGESWQDFLRNNAKSMRCALLSHRDGAKVCLGTRWTEQQYETAENMLAFLCQQGFSLENALYAVSAVRNFTLGCVLFDQESQVAKEERETPTTASMPPLLRQAWELKDHQGAEPAFLLGLELIICGLEKQLKCESGS

SEQ ID NO: 133 - protein, 208 aa, Artificial Sequence
  synthetic construct; Sulfonylurea responsive repressor
  MISC_FEATURE (152)..(152): Xaa = any amino acid
MGSRLDKSKVINSALELLNEVGIEGLTTRKLAQKLGVEQPTLYWHVKNKRALLDALAIEMMDRHPTHYCPLEGESWQDFLRNNAKSMRCALLSHRDGAKVCLGTRWTEQQYETAENQLAFLCQQGFSLENALYAMSAVRNFTLGCVLFDQEXQVAKEERETPTTASMPPLLRQAWELKDHQGAEPAFLFGLELIICGLEKQLKCESGS

SEQ ID NO: 134 - protein, 208 aa, Artificial Sequence
  synthetic construct; Sulfonylurea responsive repressor
MGSRLDKSKVINSALELLNEVGIEGLTTRKLAQKLGVEQPTLYWHVKNKRALLDALAIEMMDRHQTHFCPLEGESWQDFLRNTAKSMRCALLSHRDGAKVCLGTRWTEQQYETAENMLAFLCQQGFSLENALYAVSAVRVFTLGCVLFDQESQVAKEERETPTTASMPPLARQAWELKDHQGAEPAFLFGLELIICGLEKQLKCESGS

SEQ ID NO: 135 - protein, 208 aa, Artificial Sequence
  synthetic construct; Sulfonylurea responsive repressor
MGSRLDKSKVINSALELLNEVGIEGLTTRKLAQKLGVEQPTLYWHVKNKRALLDALAIEMMDRHQTHVCPLEGESWQDFLRNNAKSMRCALLSHRDGAKVCLGTRWTEQMYETAENQLAFLCQQGFSLENALYAVSAVRVFTLGCVLFDQESQVAKEERETPTTASMPPLLRQAWELKDHQGAEPAFLFGLELIICGLEKQLKCESGS

SEQ ID NO: 136 - protein, 208 aa, Artificial Sequence
  synthetic construct; Sulfonylurea responsive repressor
MGSRLDKSKVINSALELLNEVGIEGLTTRKLAQKLGVEQPTLYWHVKNKRALLDALAIEMMDRHATHYCPLEGESWQDFLRNTAKSMRCALLSHRDGAKVCLGTRWTEQLYETAENQLAFLCQQGFSLENALYAMSAVRVFTLGCVLFDQESQVAKEERETPTTASMPPLLRQAWELKDHQGAEPAFLFGLELIICGLEKQLKCESGS

SEQ ID NO: 137 - protein, 208 aa, Artificial Sequence
  synthetic construct; Sulfonylurea responsive repressor
MGSRLDKSKVINSALELLNEVGIEGLTTRKLAQKLGVEQPTLYWHVKNKRALLDALAIEMMDRHATHYCPLEGESWQDFLRNNAKSMRCALLSHRDGAKVCLGTRWTEQLYETAENMLAFLCQQGFSLENALYAMSAVRVFTLGCVLFDQESQVAKEERETPTTASMPPLVRQGWELKDHQGAEPAFLFGLELIICGLEKQLKCESGS

SEQ ID NO: 138 - protein, 208 aa, Artificial Sequence
  synthetic construct; Sulfonylurea responsive repressor
MGSRLDKSKVINSALELLNEVGIEGLTTRKLAQKLGVEQPTLYWHVKNKRALLDALAIEMMDRHQTHYCPLEGESWQDFLRNNAKSMRCALLSHRDGAKVWLGTRWTEKQYESAENMLAFLCQQGFSLENALYAVSAVRVFTLGCVLFDQELQVAKEERETPTTASMPPLVRQAWELKDHQGAEPAFLFGLELIICGLEKQLKCESGS

SEQ ID NO: 139 - protein, 208 aa, Artificial Sequence
  synthetic construct; Sulfonylurea responsive repressor
MGSRLDKSKVINSALELLNEVGIEGLTTRKLAQKLGVEQPTLYWHVKNKRALLDALAIEMMDRHQTHMCPLEGESWQDFLRNTAKSMRCALLSHRDGAKVCLGTRWTEQMYEAAENQLAFLCQQGFSLENALYAMSAVRVFTLGCVLFDQESQVAKEERETPTTASMPPLVRQVWELKDHQGAEPAFLFGLELIICGLEKQLKCESGS

SEQ ID NO: 140 - protein, 208 aa, Artificial Sequence
  synthetic construct; Sulfonylurea responsive repressor
MGSRLDKSKVINSALELLNEVGIEGLTTRKLAQKLGVEQPTLYWHVKNKRALLDALAIEMMDRHQTHYCPLEGESWQDFLRNTAKSMRCALLSHRDGAKVCLGTRWTEQMYETAENQLAFLCQQGFSLENALYAMSAVRVFTLGCVLFDQESQVAKEERETPTTASMPPLLRQVWELKDHQGAEPAFLFGLELIICGLEKQLKCESGS

SEQ ID NO: 141 - protein, 208 aa, Artificial Sequence
  synthetic construct; Sulfonylurea responsive repressor
  misc_feature (109)..(109): Xaa can be any naturally occurring amino acid
  MISC_FEATURE (113)..(113): Xaa = any amino acid
MGSRLDKSKVINSALELLNEVGIEGLTTRKLAQKLGVEQPTLYWHVKNKRALLDALAIEMMDRHQTHICPLEGESWQDFLRNTAKSMRCALLSHRDGAKVCLGTRWTEXQYEXAENMLAFLCQQGFSLENALYAMSAVRVFTLGCVLFDQELQVAKEERETPTTASMPPLVRQVWELKDHQGAEPAFLFGLELIICGLEKQLKCESGS

SEQ ID NO: 142 - protein, 208 aa, Artificial Sequence
  synthetic construct; Sulfonylurea responsive repressor
MGSRLDKSKVINSALELLNEVGIEGLTTRKLAQKLGVEQPTLYWHVKNKRALLDALAIEMMDRHQTHMCPLEGESWQDFLRNNAKSMRCALLSHRDGAKVCLGTRWTEQHYEAAENQLAFLCQQGFSLENALYAMSAVRVFTLGCVLFDQESQVAKEERETPTTASMPPLVRQAWELKDHQGAEPAFLFGLELIICGLEKQLKCESGS

SEQ ID NO: 143 - protein, 208 aa, Artificial Sequence
  synthetic construct; Sulfonylurea responsive repressor
  MISC_FEATURE (135)..(135): Xaa = any amino acid
  MISC_FEATURE (171)..(171): Xaa = any amino acid
MGSRLDKSKVINSALELLNEVGIEGLTTRKLAQKLGVEQPTLYWHVKNKRALLDALAIEMMDRHATHYCPLEGESWQDFLRNTAKSMRCALLSHRDGAKVCLGTRWTEQHYETAENQLAFLCQQGFSLENALYAXSAVRVFTLGCVLFDQELQVAKEERETPTTASMPPLXRQVWELKDHQGAEPAFLFGLELIICGLEKQLKCESGS

SEQ ID NO: 144 - protein, 208 aa, Artificial Sequence
  synthetic construct; Sulfonylurea responsive repressor
  MISC_FEATURE (68)..(68): Xaa = any amino acid
  MISC_FEATURE (113)..(113): Xaa = any amino acid
  MISC_FEATURE (139)..(139): Xaa = any amino acid
MGSRLDKSKVINSALELLNEVGIEGLTTRKLAQKLGVEQPTLYWHVKNKRALLDALAIEMMDRHQTHXCPLEGESWQDFLRNTAKSMRCALLSHRDGAKVCLGTRWTEQLYEXAENQLAFLCQQGFSLENALYAMSAVXVFTLGCVLFDQELQVAKEERETPTTASMPPLSRQVWELKDHQGAEPAFLFGLELIICGLEKQLKCESGS

SEQ ID NO: 145 - protein, 208 aa, Artificial Sequence
  synthetic construct; Sulfonylurea responsive repressor
MGSRLDKSKVINSALELLNEVGIEGLTTRKLAQKLGVEQPTLYWHVKNKRALLDALAIEMMDRHATHICPLEGESWQDFLRNNAKSMRCALLSHRDGAKVCLGTRWTEQQYEAAENMLAFLCQQGFSLENALYAMSAVRVFTLGCVLFDQELQVAKEERETPTTASMPPLLRQVWELKDHQGAEPAFLFGLELIICGLEKQLKCESGS

SEQ ID NO: 146 - protein, 208 aa, Artificial Sequence
  synthetic construct; Sulfonylurea responsive repressor
MGSRLDKSKVINSALELLNEVGIEGLTTRKLAQKLGVEQPTLYWHVKNKRALLDALAIEMMDRHQTHICPLEGESWQDFLRNNAKSMRCALLSHRDGAKVCLGTRWTEQQYETAENQLAFLCQQGFSLENALYAMSAVRVFTLGCVLFDQESQVAKEERETPTTASMPPLVRQGWELKDHQGAEPAFLFGLELIICGLEKQLKCESGS

SEQ ID NO: 147 - protein, 208 aa, Artificial Sequence
  synthetic construct; Sulfonylurea responsive repressor
MGSRLDKSKVINSALELLNEVGIEGLTTRKLAQKLGVEQPTLYWHVKNKRALLDALAIEMMDRHQTHVCPLEGESWQDFLRNNAKSMRCALLSHRDGAKVCLGTRWTEQQYESAENMLAFLCQQGFSLENALYAMSAVRVFTLGCVLFDQESQVAKEERETPTTASMPPLLRQVLELKDHQGAEPAFLFGLELIICGLEKQLKCESGS

SEQ ID NO: 148 - protein, 208 aa, Artificial Sequence
  synthetic construct; Sulfonylurea responsive repressor
MGSRLDKSKVINSALELLNEVGIEGLTTRKLAQKLGVEQPTLYWHVKNKRALLDALAIEMMDRHATNYCPLEGESWQDFLRNTAKSMRCALLSHRDGAKVCLGTRWTEQQYETAENMLAFLCQQGFSLENALYAVSAVRVFTLGCVLFDQELQVAKEERETPTTASMPPLLRQVWELKDHQGAEPAFLFGLELIICGLEKQLKCESGS

SEQ ID NO: 149 - protein, 208 aa, Artificial Sequence
  synthetic construct; Sulfonylurea responsive repressor
MGSRLDKSKVINSALELLNEVGIEGLTTRKLAQKLGVEQPTLYWHVKNKRALLDALAIEMMDRHQTHFCPLEGESWQDFLRNTAKSMRCALLSHRDGAKVWLGTRWTEKQYETAENQLAFLCQQGFSLENALYAVSAVRVFTLGCVLFDQELQVAKEERETPTTASMPPLLRQAWELKDHQGAEPAFLFGLELIICGLEKQLKCESGS

SEQ ID NO: 150 - protein, 208 aa, Artificial Sequence
  synthetic construct; Sulfonylurea responsive repressor
  MISC_FEATURE (109)..(109): Xaa = any amino acid
  MISC_FEATURE (110)..(110): Xaa = any amino acid
  MISC_FEATURE (113)..(113): Xaa = any amino acid
  MISC_FEATURE (139)..(139): Xaa = any amino acid
  MISC_FEATURE (140)..(140): Xaa = any amino acid
  MISC_FEATURE (171)..(171): Xaa = any amino acid
  misc_feature (174)..(174): Xaa can be any naturally occurring amino acid
MGSRLDKSKVINSALELLNEVGIEGLTTRKLAQKLGVEQPTLYWHVKNKRALLDALAIEMMDRHQTHYCPLEGESWQDFLRNTAKSMRCALLSHRDGAKVCLGTRWTEXXYEXAENQLAFLCQQGFSLENALYAMSAVXXFTLGCVLFDQESQVAKEERETPTTASMPPLXRQXWELKDHQGAEPAFLFGLELIICGLEKQLKCESGS

SEQ ID NO: 151 - protein, 208 aa, Artificial Sequence
  synthetic construct; Sulfonylurea responsive repressor
MGSRLDKSKVINSALELLNEVGIEGLTTRKLAQKLGVEQPTLYWHVKNKRALLDALAIEMMDRHQTHYCPLEGESWQDFLRNNAKSMRCALLSHRDGAKVCLGTRWTEQLYETAENMLAFLCQQGFSLENALYAMSAVRVFTLGCVLFDQESQVAKEERETPTTASMPPLLRQVWELKDHQGAEPAFLFGLELIICGLEKQLKCESGS

SEQ ID NO: 152 - protein, 208 aa, Artificial Sequence
  synthetic construct; Sulfonylurea responsive repressor
MGSRLDKSKVINSALELLNEVGIEGLTTRKLAQKLGVEQPTLYWHVKNKRALLDALAIEMMDRHATHLCPLEGESWQDFLRNTAKSMRCALLSHRDGAKVCLGTRWTEQQYEAAENMLAFLCQQGFSLENALYAMSAVRVFTLGCVLFDQESQVAKEERETPTTASMPPLLRQVWELKDHQGAEPAFLFGLELIICGLEKQLKCESGS

SEQ ID NO: 153 - protein, 208 aa, Artificial Sequence
  synthetic construct; Sulfonylurea responsive repressor
MGSRLDKSKVINSALELLNEVGIEGLTTRKLAQKLGVEQPTLYWHVKNKRALLDALAIEMMDRHQTHYCPLEGESWQDFLRNNAKSMRCALLSHRDGAKVCLGTRWTEKHYESAENMLAFLCQQGFSLENALYAMSAVRVFTLGCVLFDQELQVAKEERETPTTASMPPLLRQVWELKDHQGAEPAFLFGLELIICGLEKQLKCESGS

SEQ ID NO: 154 - protein, 208 aa, Artificial Sequence
  synthetic construct; Sulfonylurea responsive repressor
MGSRLDKSKVINSALELLNEVGIEGLTTRKLAQKLGVEQPTLYWHVKNKRALLDALAIEMMDRHQTHYCPLEGESWQDFLRNNAKSMRCALLSHRDGAKVCLGTRWTEQHYETAENQLAFLCQQGFSLENALYAMSAVRVFTLGCVLFDQESQVAKEERETPTTASMPPLVRQGWELKDHQGAEPAFLFGLELIICGLEKQLKCESGS

SEQ ID NO: 155 - protein, 208 aa, Artificial Sequence
  synthetic construct; Sulfonylurea responsive repressor
MGSRLDKSKVINSALELLNEVGIEGLTTRKLAQKLGVEQPTLYWHVKNKRALLDALAIEMMDRHATHYCPLEGESWQDFLRNNAKSMRCALLSHRDGAKVCLGTRWTEKQYEAAENQLAFLCQQGFSLENALYAVSAVRVFTLGCVLFDQESQVAKEERETPTTASMPPLLRQGWELKDHQGAEPAFLFGLELIICGLEKQLKCESGS

SEQ ID NO: 156 - protein, 208 aa, Artificial Sequence
  synthetic construct; Sulfonylurea responsive repressor
MGSRLDKSKVINSALELLNEVGIEGLTTRKLAQKLGVEQPTLYWHVKNKRALLDALAIEMMDRHATHYCPLEGESWQDFLRNNAKSMRCALLSHRDGAKVCLGTRWTEQLYEAAENQLAFLCQQGFSLENALYAMSAVRVFTLGCVLFDQESQVAKEERETPTTASMPPLVRQVWELKDHQGAEPAFLFGLELIICGLEKQLKCESGS

SEQ ID NO: 157 - protein, 208 aa, Artificial Sequence; identical to SEQ ID NO: 17
  synthetic construct; Sulfonylurea responsive repressor

SEQ ID NO: 158 - protein, 208 aa, Artificial Sequence
  synthetic construct; Sulfonylurea responsive repressor
MGSRLDKSKVINSALELLNEVGIEGLTTRKLAQKLGVEQPTLYWHVKNKRALLDALAIEMMDRHQTHYCPLEGESWQDFLRNNAKSMRCALLSHRDGAKVCLGTRWTEKHYETAENMLAFLCQQGFSLENALYAVSAVRVFTLGCVLFDQELQVAKEERETPTTASMPPLLRQVWELKDHQGAEPAFLFGLELIICGLEKQLKCESGS

SEQ ID NO: 159 - protein, 208 aa, Artificial Sequence
  synthetic construct; Sulfonylurea responsive repressor
  MISC_FEATURE (65)..(65): Xaa = any amino acid
  MISC_FEATURE (110)..(110): Xaa = any amino acid
  MISC_FEATURE (113)..(113): Xaa = any amino acid
  MISC_FEATURE (135)..(135): Xaa = any amino acid
  MISC_FEATURE (171)..(171): Xaa = any amino acid
MGSRLDKSKVINSALELLNEVGIEGLTTRKLAQKLGVEQPTLYWHVKNKRALLDALAIEMMDRHXTHYCPLEGESWQDFLRNTAKSMRCALLSHRDGAKVWLGTRWTEQXYEXAENLLAFLCQQGFSLENALYAXSAVRNFTLGCVLFDQESQVAKEERETPTTASMPPLXRQGWELKDHQGAEPAFLFGLELIICGLEKQLKCESGS

SEQ ID NO: 160 - protein, 208 aa, Artificial Sequence
  synthetic construct; Sulfonylurea responsive repressor
MGSRLDKSKVINSALELLNEVGIEGLTTRKLAQKLGVEQPTLYWHVKNKRALLDALAIEMMDRHQTHICPLEGESWQDFLRNTAKSMRCALLSHRDGAKVCLGTRWTEKHYEAAENMLAFLCQQGFSLENALYAVSAVRVFTLGCVLFDQESQVAKEERETPTTASMPPLVRQVWELKDHQGAEPAFLFGLELIICGLEKQLKCESGS

SEQ ID NO: 161 - protein, 208 aa, Artificial Sequence
  synthetic construct; Sulfonylurea responsive repressor
MGSRLDKSKVINSALELLNEVGIEGLTTRKLAQKLGVEQPTLYWHVKNKRALLDALAIEMMDRHQTHYCPLEGESWQDFLRNNAKSMRCALLSHRDGAKVCLGTRWTEQLYESAENQLAFLCQQGFSLENALYAMSAVRVFTLGCVLFDQELQVAKEERETPTTASMPPLLRQGWELKDHQGAEPAFLFGLELIICGLEKQLKCESGS

SEQ ID NO: 162 - protein, 208 aa, Artificial Sequence
  synthetic construct; Sulfonylurea responsive repressor
MGSRLDKSKVINSALELLNEVGIEGLTTRKLAQKLGVEQPTLYWHVKNKRALLDALAIEMMDRHATHICPLEGESWQDFLRNNAKSMRCALLSHRDGAKVCLGTRWTEQQYEAAENQLAFLCQQGFSLENALYAVSAVRVFTLGCVLFDQELQVAKEERETPTTASMPPLLRQAWELKDHQGAEPAFLFGLELIICGLEKQLKCESGS

SEQ ID NO: 163 - protein, 208 aa, Artificial Sequence
  synthetic construct; Sulfonylurea responsive repressor
MGSRLDKSKVINSALELLNEVGIEGLTTRKLAQKLGVEQPTLYWHVKNKRALLDALAIEMMDRHATHYCPLEGESWQDFLRNNAKSMRCALLSHRDGAKVCLGTRWTEKQYETAENQLAFLCQQGFSLENALYAVSAVRVFTLGCVLFDQELQVAKEERETPTTASMPPLLRQVWELKDHQGAEPAFLFGLELIICGLEKQLKCESGS

SEQ ID NO: 164 - protein, 208 aa, Artificial Sequence
  synthetic construct; Sulfonylurea responsive repressor
MGSRLDKSKVINSALELLNEVGIEGLTTRKLAQKLGVEQPTLYWHVKNKRALLDALAIEMMDRHATHYCPLEGESWQDFLRNNAKSMRCALLSHRDGAKVCLGTRWTEKHYETAENQLAFLCQQGFSLENALYAMSAVRVFTLGCVLFDQESQVAKEERETPTTASMPPLLRQVWELKDHQGAEPAFLFGLELIICGLEKQLKCESGS

SEQ ID NO: 165 - protein, 208 aa, Artificial Sequence
  synthetic construct; Sulfonylurea responsive repressor
  MISC_FEATURE (110)..(110): Xaa = any amino acid
MGSRLDKSKVINSALELLNEVGIEGLTTRKLAQKLGVEQPTLYWHVKNKRALLDALAIEMMDRHQTHYCPLEGESWQDFLRNNAKSMRCALLSHRDGAKVWLGTRWTEQXYEAAENMLAFLCQQGFSLENALYAVSAVGVFTLGCVLFDQELQVAKEERETPTTASMPPLARQVLELKDHQGAEPAFLFGLELIICGLEKQLKCESGS

SEQ ID NO: 166 - protein, 208 aa, Artificial Sequence
  synthetic construct; Sulfonylurea responsive repressor
MGSRLDKSKVINSALELLNEVGIEGLTTRKLAQKLGVEQPTLYWHVKNKRALLDALAIEMMDRHATHYCPLEGESWQDFLRNNAKSMRCALLSHRDGAKVCLGTRWTEKLYEAAENMLAFLCQQGFSLENALYAVSAVRVFTLGCVLFDQESQVAKEERETPTTASMPPLLRQVWELKDHQGAEPAFLFGLELIICGLEKQLKCESGS

SEQ ID NO: 167 - protein, 208 aa, Artificial Sequence
  synthetic construct; Sulfonylurea responsive repressor
MGSRLDKSKVINSALELLNEVGIEGLTTRKLAQKLGVEQPTLYWHVKNKRALLDALAIEMMDRHATHMCPLEGESWQDFLRNNAKSMRCALLSHRDGAKVWLGTRWTEQQYETAENMLAFLCQQGFSLENALYAVSAVRVFTLGCVLFDQELQVAKEERETPTTASMPPLLRQVWELKDHQGAEPAFLFGLELIICGLEKQLKCESGS

SEQ ID NO: 168 - protein, 208 aa, Artificial Sequence
  synthetic construct; Sulfonylurea responsive repressor
MGSRLDKSKVINSALELLNEVGIEGLTTRKLAQKLGVEQPTLYWHVKNKRALLDALAIEMMDRHQTHYCPLEGESWQDFLRNNAKSMRCALLSHRDGAKVCLGTRWTEKQYETAENQLAFLCQQGFSLENALYAMSAVRNFTLGCVLFDQESQVAKEERETPTTASMPPLLRQAWELKDHQGAEPAFLFGLELIICGLEKQLKCESGS

SEQ ID NO: 169 - protein, 208 aa, Artificial Sequence
  synthetic construct; Sulfonylurea responsive repressor
MGSRLDKSKVINSALELLNEVGIEGLTTRKLAQKLGVEQPTLYWHVKNKRALLDALAIEMMDRHQTHYCPLEGESWQDFLRNNAKSMRCALLSHRDGAKVCLGTRWTEQQYETAENQLAFLCQQGFSLENALYAVSAVRVFTLGCVLFDQELQVAKEERETPTTASMPPLLRQGWELKDHQGAEPAFLFGLELIICGLEKQLKCESGS

SEQ ID NO: 170 - protein, 208 aa, Artificial Sequence
  synthetic construct; Sulfonylurea responsive repressor
MGSRLDKSKVINSALELLNEVGIEGLTTRKLAQKLGVEQPTLYWHVKNKRALLDALAIEMMDRHQTHICPLEGESWQDFLRNNAKSMRCALLSHRDGAKVCLGTRWTEKLYETAENQLAFLCQQGFSLENALYAMSAVRVFTLGCVLFDQELQVAKEERETPTTASMPPLVRQVWELKDHQGAEPAFLFGLELIICGLEKQLKCESGS

SEQ ID NO: 171 - protein, 208 aa, Artificial Sequence
  synthetic construct; Sulfonylurea responsive repressor
MGSRLDKSKVINSALELLNEVGIEGLTTRKLAQKLGVEQPTLYWHVKNKRALLDALAIEMMDRHQTHICPLEGESWQDFLRNNAKSMRCALLSHRDGAKVCLGTRWTEKQYESAENMLAFLCQQGFSLENALYAVSAVRVFTLGCVLFDQELQVAKEERETPTTASMPPLVRQVWELKDHQGAEPAFLFGLELIICGLEKQLKCESGS

SEQ ID NO: 172 - protein, 208 aa, Artificial Sequence
  synthetic construct; Sulfonylurea responsive repressor
MGSRLDKSKVINSALELLNEVGIEGLTTRKLAQKLGVEQPTLYWHVKNKRALLDALAIEMMDRHATHLCPLEGESWQDFLRNNAKSMRCALLSHRDGAKVCLGTRWTEKQYEAAENQLAFLCQQGFSLENALYAVSAVRVFTLGCVLFDQESQVAKEERETPTTASMPPLLRQVWELKDHQGAEPAFLFGLELIICGLEKQLKCESGS

SEQ ID NO: 173 - protein, 208 aa, Artificial Sequence
  synthetic construct; Sulfonylurea responsive repressor
MGSRLDKSKVINSALELLNEVGIEGLTTRKLAQKLGVEQPTLYWHVKNKRALLDALAIEMMDRHATHLCPLEGESWQDFLRNNAKSMRCALLSHRDGAKVCLGTRWTEQLYETAENMLAFLCQQGFSLENALYAVSAVRNFTLGCVLFDQESQVAKEERETPTTASMPPLLRQVWELKDHQGSEPAFLFGLELIICGLEKQLKCESGS

SEQ ID NO: 174 - protein, 208 aa, Artificial Sequence
  synthetic construct; Sulfonylurea responsive repressor
MGSRLDKSKVINSALELLNEVGIEGLTTRKLAQKLGVEQPTLYWHVKNKRALLDALAIEMMDRHQTHICPLEGESWQDFLRNNAKSMRCALLSHRDGAKVCLGTRWTEKQYETAENMLAFLCQQGFSLENALYAVSAVRVFTLGCVLFDQELQVAKEERETPTTASMPPLVRQAWELKDHQGAEPAFLFGLELIICGLEKQLKCESGS

SEQ ID NO: 175 - protein, 208 aa, Artificial Sequence
  synthetic construct; Sulfonylurea responsive repressor
MGSRLDKSKVINSALELLNEVGIEGLTTRKLAQKLGVEQPTLYWHVKNKRALLDALAIEMMDRHQTHMCPLEGESWQDFLRNNAKSMRCALLSHRDGAKVCLGTRWTEQQYEAAENMLAFLCQQGFSLENALYAMSAVRNFTLGCVLFDQESQVAKEERETPTTASMPPLLRQAWELKDHQGAEPAFLFGLELIICGLEKQLKCESGS

SEQ ID NO: 176 - protein, 208 aa, Artificial Sequence
  synthetic construct; Sulfonylurea responsive repressor
MGSRLDKSKVINSALELLNEVGIEGLTTRKLAQKLGVEQPTLYWHVKNKRALLDALAIEMMDRHATHYCPLEGESWQDFLRNNAKSMRCALLSHRDGAKVCLGTRWTEKQYETAENQLAFLCQQGFSLENALYAMSAVRVFTLGCVLFDQELQVAKEERETPTTASMPPLVRQAWELKDHQGAEPAFLFGLELIICGLEKQLKCESGS

SEQ ID NO: 177 - protein, 208 aa, Artificial Sequence
  synthetic construct; Sulfonylurea responsive repressor
MGSRLDKSKVINSALELLNEVGIEGLTTRKLAQKLGVEQPTLYWHVKNKRALLDALAIEMMDRHQTHYCPLEGESWQDFLRNTAKSMRCALLSHRDGAKVCLGTRWTEKQYETAENMLAFLCQQGFSLENALYAVSAVRVFTLGCVLFDQESQVAKEERETPTTASMPPLLRQGLELKDHQGAEPAFLFGLELIICGLEKQLKCESGS

SEQ ID NO: 178 - protein, 208 aa, Artificial Sequence
  synthetic construct; Sulfonylurea responsive repressor
  MISC_FEATURE (65)..(65): Xaa = any amino acid
MGSRLDKSKVINSALELLNEVGIEGLTTRKLAQKLGVEQPTLYWHVKNKRALLDALAIEMMDRHXTHYCPLEGESWQDFLRNNAKSMRCALLSHRDGAKVCLGTRWTEKHYETAENMLAFLCQQGFSLENALYAMSAVRNFTLGGVLFDQESQVAKEERETPTTASMPPLARQVWELKDHQGAEPAFLFGLELIICGLEKQLKCESGS

SEQ ID NO: 179 - protein, 208 aa, Artificial Sequence
  synthetic construct; Sulfonylurea responsive repressor
MGSRLDKSKVINSALELLNEVGIEGLTTRKLAQKLGVEQPTLYWHVKNKRALLDALAIEMMDRHQTHICPLEGESWQDFLRNNAKSMRCALLSHRDGAKVCLGTRWTEKMYETAENQLAFLCQQGFSLENALYAMSAVRVFTLGCVLFDQELQVAKEERETPTTASMPPLLRQAWELKDHQGAEPAFLFGLELIICGLEKQLKCESGS

SEQ ID NO: 180 - protein, 208 aa, Artificial Sequence
  synthetic construct; Sulfonylurea responsive repressor
MGSRLDKSKVINSALELLNEVGIEGLTTRKLAQKLGVEQPTLYWHVKNKRALLDALAIEMMDRHQTHYCPLEGESWQDFLRNTAKSMRCALLSHRDGAKVCLGTRWTEQQYETAENMLAFLCQQGFSLENALYAVSAVRVFTLGCVLFDQESQVAKEERETPTTASMPPLLRQAWELKDHQGAEPAFLFGLELIICGLEKQLKCESGS

SEQ ID NO: 181 - protein, 208 aa, Artificial Sequence
  synthetic construct; Sulfonylurea responsive repressor
MGSRLDKSKVINSALELLNEVGIEGLTTRKLAQKLGVEQPTLYWHVKNKRALLDALAIEMMDRHATHYCPLEGESWQDFLRNNAKSMRCALLSHRDGAKVCLGTRWTEQHYETAENQLAFLCQQGFSLENALYAVSAVRVFTLGCVLFDQESQVAKEERETPTTASMPPLLRQVWELKDHQGAEPAFLFGLELIICGLEKQLKCESGS

SEQ ID NO: 182 - protein, 208 aa, Artificial Sequence
  synthetic construct; Sulfonylurea responsive repressor
MGSRLDKSKVINSALELLNEVGIEGLTTRKLAQKLGVEQPTLYWHVKNKRALLDALAIEMMDRHATHLCPLEGESWQDFLRNNAKSMRCALLSHRDGAKVCLGTRWTEKQYETAENQLAFLCQQGFSLENALYAVSAVRVFTLGCVLFDQESQVAKEERETPTTASMPPLLRQVWELKDHQGAEPAFLFGLELIICGLEKQLKCESGS

SEQ ID NO: 183 - protein, 208 aa, Artificial Sequence
  synthetic construct; Sulfonylurea responsive repressor
MGSRLDKSKVINSALELLNEVGIEGLTTRKLAQKLGVEQPTLYWHVKNKRALLDALAIEMMDRHQTHYCPLEGESWQDFLRNNAKSMRCALLSHRDGAKVCLGTRWTEQQYETAENMLAFLCQQGFSLENALYAMSAVRVFTLGCVLFDQESQVAKEERETPTTASMPPLLRQALELKDHQGAEPAFLFGLELIICGLEKQLKCESGS

SEQ ID NO: 184 - protein, 208 aa, Artificial Sequence
  synthetic construct; Sulfonylurea responsive repressor
MGSRLDKSKVINSALELLNEVGIEGLTTRKLAQKLGVEQPTLYWHVKNKRALLDALAIEMMDRHQTHFCPLEGESWQDFLRNTAKSMRCALLSHRDGAKVCLGTRWTEQLYEAAENMLAFLCQQGFSLENALYAVSAVRVFTLGCVLFDQESQVAKEERETPTTASMPPLLRQGWELKDHQGAEPAFLFGLELIICGLEKQLKCESGS

SEQ ID NO: 185 - protein, 208 aa, Artificial Sequence
  synthetic construct; Sulfonylurea responsive repressor
MGSRLDKSKVINSALELLNEVGIEGLTTRKLAQKLGVEQPTLYWHVKNKRALLDALAIEMMDRHATHLCPLEGESWQDFLRNNAKSMRCALLSHRDGAKVCLGTRWTEQLYETAENQLAFLCQQGFSLENALYAVSAVRVFTLGCVLFDQESQVAKEERETPTTASMPPLLRQVWELKDHQGAEPAFLFGLELIICGLEKQLKCESGS

SEQ ID NO: 186 - protein, 208 aa, Artificial Sequence
  synthetic construct; Sulfonylurea responsive repressor
MGSRLDKSKVINSALELLNEVGIEGLTTRKLAQKLGVEQPTLYWHVKNKRALLDALAIEMMDRHQTHYCPLEGESWQDFLRNNAKSMRCALLSHRDGAKVCLGTRWTEQMYEGAENMLAFLCQQGFSLENALYAVSAVRNFTLGCVLFDQESQVAKEERETPTTASMPPLLRQAWELKDHQGAEPAFLFGLELIICGLEKQLKCESGS

SEQ ID NO: 187 - protein, 208 aa, Artificial Sequence
  synthetic construct; Sulfonylurea responsive repressor
MGSRLDKSKVINSALELLNEVGIEGLTTRKLAQKLGVEQPTLYWHVKNKRALLDALAIEMMDRHATHYCPLEGESWQDFLRNNAKSMRCALLSHRDGAKVCLGTRWTEQQYETAENQLAFLCQQGFSLENALYAMSAVRVFTLGCVLFDQESQVAKEERETPTSASMPPLVRQVWELKDHQGAEPAFLFGLELIICGLEKQLKCESGS

SEQ ID NO: 188 - protein, 208 aa, Artificial Sequence
  synthetic construct; Sulfonylurea responsive repressor
MGSRLDKSKVINSALELLNEVGIEGLTTRKLAQKLGVEQPTLYWHVKNKRALLDALAIEMMDRHQTHYCPLEGESWQDFLRNTAKSMRCALLSHRDGAKVCLGTRWTEKQYEAAENMLAFLCQQGFSLENALYAMSAVRVFTLGCVLFDQESQVAKEERETPTTASMPPLLRQAWELKDHQGAEPAFLFGLELIICGLEKQLKCESGS

SEQ ID NO: 189 - protein, 208 aa, Artificial Sequence
  synthetic construct; Sulfonylurea responsive repressor
MGSRLDKSKVINSALELLNEVGIEGLTTRKLAQKLGVEQPTLYWHVKNKRALLDALAIEMMDRHQTHLCPLEGESWQDFLRNNAKSMRCALLSHRDGAKVCLGTRWTEQLYEAAENMLAFLCQQGFSLENALYAVSAVRVFTLGCVLFDQESQVAKEERETPTTASMPPLVRQGWELKDHQGAEPAFLFGLELIICGLEKQLKCESGS

SEQ ID NO: 190 - protein, 208 aa, Artificial Sequence
  synthetic construct; Sulfonylurea responsive repressor
MGSRLDKSKVINSALELLNEVGIEGLTTRKLAQKLGVEQPTLYWHVKNKRALLDALAIEMMDRHQTHYCPLEGESWQDFLRNTAKSMRCALLSHRDGAKVCLGTRWTEQLYETAENQLAFLCQQGFSLENALYAMSAVRVFTLGCVLFDQESQVAKEERETPTTASMPPLLRQGWELKDHQGAEPAFLFGLELIICGLEKQLKCESGS

SEQ ID NO: 191 - protein, 208 aa, Artificial Sequence
  synthetic construct; Sulfonylurea responsive repressor
MGSRLDKSKVINSALELLNEVGIEGLTTRKLAQKLGVEQPTLYWHVKNKRALLDALAIEMMDRHQTHYCPLEGESWQDFLRNTAKSMRCALLSHRDGAKVCLGTRWTEQHYEAAENMLAFLCQQGFSLENALYAMSAVRVFTLGCVLFDQESQVAKEERETPTTASMPPLLRQAWELKDHQGAEPAFLLGLELIICGLEKQLKCESGS

SEQ ID NO: 192 - protein, 208 aa, Artificial Sequence
  synthetic construct; Sulfonylurea responsive repressor
MGSRLDKSKVINSALELLNEVGIEGLTTRKLAQKLGVEQPTLYWHVKNKRALLDALAIEMMDRHQTHMCPLEGESWQDFLRNNAKSMRCALLSHRDGAKVCLGTRWTEKQYEGAENQLAFLCQQGFSLENALYAVSAVRVFTLGCVLFDQESQVAKEERETPTTASMPPLVRQVWELKDHQGAEPAFLFGLELIICGLEKQLKCESGS

SEQ ID NO: 193 - protein, 208 aa, Artificial Sequence
  synthetic construct; Sulfonylurea responsive repressor
MGSRLDKSKVINSALELLNEVGIEGLTTRKLAQKLGVEQPTLYWHVKNKRALLDALAIEMMDRHQTHICPLEGESWQDFLRNNAKSMRCALLSHRDGAKVCLGTRWTEQQYEGAENQLAFLCQQGFSLENALYAMSAVRVFTLGCVLFDQESQVAKEERETPTTASMPPLLRQGWELKDHQGAEPAFLFGLELIICGLEKQLKCESGS

SEQ ID NO: 194 - protein, 208 aa, Artificial Sequence
  synthetic construct; Sulfonylurea responsive repressor
MGSRLDKSKVINSALELLNEVGIEGLTTRKLAQKLGVEQPTLYWHVKNKRALLDALAIEMMDRHATHMCPLEGESWQDFLRNNAKSMRCALLSHRDGAKVCLGTRWTEQHYETAENQLAFLCQQGFSLENALYAVSAVRVFTLGCVLFDQESQVAKEERETPTTASMPPLLRQGWELKDHQGAEPAFLFGLELIICGLEKQLKCESGS

SEQ ID NO: 195 - protein, 208 aa, Artificial Sequence
  synthetic construct; Sulfonylurea responsive repressor
MGSRLDKSKVINSALELLNEVGIEGLTTRKLAQKLGVEQPTLYWHVKNKRALLDALAIEMMDRHATHICPLEGESWQDFLRNNAKSMRCALLSHRDGAKVCLGTRWTEQQYETAENMLAFLCQQGFSLENALYAVSAVRVFTLGCVLFDQESQVAKEERETPTTASMPPLVRQALELKDHQGAEPAFLFGLELIICGLEKQLKCESGS

SEQ ID NO: 196 - protein, 208 aa, Artificial Sequence
  synthetic construct; Sulfonylurea responsive repressor
MGSRLDKSKVINSALELLNEVGIEGLTTRKLAQKLGVEQPTLYWHVKNKRALLDALAIEMMDRHATHFCPLEGESWQDFLRNNAKSMRCALLSHRDGAKVWLGTRWTEQQYETAENMLAFLCQQGFSLENALYAVSAVRVFTLGCVLFDQERQVAKEERETPTTASMPPLLRQVWELKDHQGAEPAFLFGLELIICGLEKQLKCESGS

SEQ ID NO: 197 - protein, 208 aa, Artificial Sequence
  synthetic construct; Sulfonylurea responsive repressor
MGSRLDKSKVINSALELLNEVGIEGLTTRKLAQKLGVEQPTLYWHVKNKRALLDALAIEMMDRHQTHFCPLEGESWQDFLRNNAKSMRCALLSHRDGAKVCLGTRWTEQQYEAAENQLAFLCQQGFSLENALYAMSAVRNFTLGCVLFDQELQVAKEERETPTTASMPPLLRQVWELKDHQGAEPAFLFGLELIICGLEKQLKCESGS

SEQ ID NO: 198 - protein, 208 aa, Artificial Sequence
  synthetic construct; Sulfonylurea responsive repressor
MGSRLDKSKVINSALELLNEVGIEGLTTRKLAQKLGVEQPTLYWHVKNKRALLDALAIEMMDRHQTHVCPLEGESWQDFLRNNAKSMRCALLSHRDGAKVCLGTRWTEQMYETAENMLAFLCQQGFSLENALYAMSAVRVFTLGCVLFDQELQVAKEERETPTTASMPPLLRQAWELKDHQGAEPAFLFGLELIICGLEKQLKCESGS

SEQ ID NO: 199 - protein, 208 aa, Artificial Sequence
  synthetic construct; Sulfonylurea responsive repressor
  MISC_FEATURE (146)..(146): Xaa = any amino acid
  MISC_FEATURE (201)..(201): Xaa = any amino acid
MGSRLDKSKVINSALELLNEVGIEGLTTRKLAQKLGVEQPTLYWHVKNKRALLDALAIEMMDRHQTHYCPLEGESWQDFLRNNAKSMRCALLSHRDGAKVCLGTRWTEQHYETAENQLAFLCQQGFSLENALYAMSAVRVFTLGCXLFDQESQVAKEERETPTTASMPPLVRQVWELKDHQGAEPAFLFGLELIICGLEKXLKCESGS

SEQ ID NO: 200 - protein, 208 aa, Artificial Sequence
  synthetic construct; Sulfonylurea responsive repressor
MGSRLDKSKVINSALELLNEVGIEGLTTRKLAQKLGVEQPTLYWHVKNKRALLDALAIEMMDRHQTHYCPLEGESWQDFLRNTAKSMRCALLSHRDGAKVCLGTRWTEQHYEGAENMLAFLCQQGFSLENALYAVSAVRVFTLGCVLFDQELQVAKEERETPTTASMPPLVRQGWELKDHQGAEPAFLFGLELIICGLEKQLKCESGS

SEQ ID NO: 201 - protein, 208 aa, Artificial Sequence
  synthetic construct; Sulfonylurea responsive repressor
MGSRLDKSKVINSALELLNEVGIEGLTTRKLAQKLGVEQPTLYWHVKNKRALLDALAIEMMDRHQTHVCPLEGESWQDFLRNNAKSMRCALLSHRDGAKVCLGTRWTEQQYEAAENQLAFLCQQGFSLENALYAMSAVRVFTLGCVLFDQELQVAKEERETPTTASMPPLLRQVWELKDHQGAEPAFLFGLELIICGLEKQLKCESGS

SEQ ID NO: 202 - protein, 208 aa, Artificial Sequence
  synthetic construct; Sulfonylurea responsive repressor
MGSRLDKSKVINSALELLNEVGIEGLTTRKLAQKLGVEQPTLYWHVKNKRALLDALAIEMMDRHATHLCPLEGESWQDFLRNTAKSMRCALLSHRDGAKVCLGTRWTEQQYESAENMLAFLCQQGFSLENALYAMSAVRVFTLGCVLFDQESQVAKEERETPTTASMPPLLRQAWELKDHQGAEPAFLFGLELIICGLEKQLKCESGS

SEQ ID NO: 203 - protein, 208 aa, Artificial Sequence
  synthetic construct; Sulfonylurea responsive repressor
MGSRLDKSKVINSALELLNEVGIEGLTTRKLAQKLGVEQPTLYWHVKNKRALLDALAIEMMDRHQTHYCPLEGESWQDFLRNTAKSMRCALLSHRDGAKVCLGTRWTEQQYESAENQLAFLCQQGFSLENALYAVSAVRVFTLGCVLFDQELQVAKEERETPTTASMPPLLRQVWELKDHQGAEPAFLFGLELIICGLEKQLKCESGS

SEQ ID NO: 204 - protein, 208 aa, Artificial Sequence
  synthetic construct; Sulfonylurea responsive repressor
MGSRLDKSKVINSALELLNEVGIEGLTTRKLAQKLGVEQPTLYWHVKNKRALLDALAIEMMDRHATHVCPLEGESWQDFLRNTAKSMRCALLSHRDGAKVCLGTRWTEQQYETAENMLAFLCQQGFSLENALYAMSAVRVFTLGCVLFDQESQVAKEERETPTTASMPPLLRQVWELKDHQGAEPAFLFGLELIICGLEKQLKCESGS

SEQ ID NO: 205 - protein, 208 aa, Artificial Sequence
  synthetic construct; Sulfonylurea responsive repressor
MGSRLDKSKVINSALELLNEVGIEGLTTRKLAQKLGVEQPTLYWHVKNKRALLDALAIEMLDRHATHYCPLEGESWQDFLRNNAKSMRCALLSHRDGAKVCLGTGFTEKQYETAENSLAFLCQQGFSLEHAMYAMQAAGIYTLGCVLLDQELQVAKEERETPTTDSMPPLVRQVLELKDHQGAEPAFLFGLELIICGLEKQLKCESGS

SEQ ID NO: 206 - protein, 208 aa, Artificial Sequence
  synthetic construct; Sulfonylurea responsive repressor
MGSRLDKSKAINSALELLNEVGIEGLTTRKLAQKLGVEQPTLYWHVKNKRALLDAMAIEMLDRHATHYCPLEGESWQDFLRNNAKSMRCALLSHRDGAKVCLGTGFTEQQYEAAENSMAFLCQQGFSLEHALYAMQAAGIFTLGCVLLDQELQVAKEERETPTTDSMPPLVRQVLELKDHQGAEPAFLFGLELIICGLEKQLKCESGS

SEQ ID NO: 207 - protein, 208 aa, Artificial Sequence
  synthetic construct; Sulfonylurea responsive repressor
MGSRLDKSKVINSALELLNEVGIEGLTTRKLAQKLGVEQPTLYWHVKNKRALLDALAIEMLDRHATHYCPLEGESWQDFLRNNAKSMRCALLSHRDGAKVCLGTGFTEQMYEAAENSMAFLCQQGFSLEHAMYAMQAVGIYTLGCVLLDQELQVAKEERETPTTDSMPPLVRQVLELKDHQGAEPAFLFGLELIICGLEIQLKCESGS

SEQ ID NO: 208 - protein, 208 aa, Artificial Sequence
  synthetic construct; Sulfonylurea responsive repressor
  MISC_FEATURE (10)..(10): Xaa = any amino acid
MGSRLDKSKXINSALELLNEVGIEGLTTRKLAQKLGVEQPTLYWHVKNKRALLDAMAIEMLDRHATHYCPLEGESWQDFLRNNAKSMRCALLSHRDGAKVCLGTGFTEQQYETAENSLAFLCQQGFSLENALYAMQAVGIYTLGCVLLDQELQVAKEERETPTTDSMPPLVRQVLELKDHQGAEPAFLFGLELIICGLEKQLKCESGS

SEQ ID NO: 209 - protein, 208 aa, Artificial Sequence
  synthetic construct; Sulfonylurea responsive repressor
  MISC_FEATURE (9)..(9): Xaa = any amino acid
MGSRLDKSXPINSALELLNEVGIEGLTTRKLAQKLGVEQPTLYWHVKNKRALLDALAIEMLDRHATHYCPLEGESWQDFLRNNAKSMRCALLSHRDGAKVCLGTGFTEQQYESAENSMAFLCQQGFSLEHALYAMQAVGIFTLGCVLLDQELQVAKEERETPTTDSMPPLLRQALELKDHQGAEPAFLFGLELIICGLEKQLKCESGS

SEQ ID NO: 210 - protein, 208 aa, Artificial Sequence
  synthetic construct; Sulfonylurea responsive repressor
MGSRLDKSKVINSALELLNEVGIEGLTTRKLAQKLGVEQPTLYWHVKNKRALLDAMAIEMLDRHATHICPLEGESWQDFLRNNAKSMRCALLSHRDGAKVCLGTGFTEQQYESAENSMAFLCQQGFSLENAMYAMQAVGIFTLGCVLLDQELQVAKEERETPTTDSMPPLVRQVLELKDHQGAEPAFLFGLELIICGLEKQLKCESGS

SEQ ID NO: 211 - protein, 208 aa, Artificial Sequence
  synthetic construct; Sulfonylurea responsive repressor
MGSRLDKSKVINSALELLNEVGIEGLTTRKLAQKLGVEQPTLYWHVKNKRALLDAMAIEMLDRHATHVCPLEGESWQDFLRNNAKSMRCALLSHRDGAKVCLGTGFTEQQYETAENSMAFLCQQGFSLENAMYAMQAVGIFTLGCVLLDQELQVAKEERETPTTDSMPPLVRQALELKDHQGAEPAFLFGLELIICGLEKQLKCESGS

SEQ ID NO: 212 - protein, 208 aa, Artificial Sequence
  synthetic construct; Sulfonylurea responsive repressor
MGSRLDKSKVINSALELLNEVGIEGLTTRKLAQKLGVEQPTLYWHVKNKRALLDAMAIEMLDRHATHYCPLEGESWQDFLRNNAKSMRCALLSHRDGAKVCLGTGFTEQMYETAENSMAFLCQQGFSLEHALYAMQAVGIYTVGCVLLDQELQVAKEERETPTTDSMPPLVRQGLELKDHQGAEPAFLFGLELIICGLEKQLKCESGS

SEQ ID NO: 213 - protein, 208 aa, Artificial Sequence
  synthetic construct; Sulfonylurea responsive repressor
  MISC_FEATURE (110)..(110): Xaa = any amino acid
MGSRLDKSKAINSALELLNEVGIEGLTTRKLAQKLGVEQPTLYWHVKNKRALLDAMAIEMLDRHATHYCPLEGESWQDFLRNNAKSMRCALLSHRDGAKVCLGTGFTEQXYEAAENSMAFLCQQGFSLENAMYAMQAVGIYTLGCVLLDQELQVAKEERETPTTDSMPPLVRQVLELKDHQGAEPAFLFGLELIICGLEKQLKCESGS

SEQ ID NO: 214 - protein, 208 aa, Artificial Sequence
  synthetic construct; Sulfonylurea responsive repressor
  MISC_FEATURE (56)..(56): Xaa = any amino acid
  MISC_FEATURE (110)..(110): Xaa = any amino acid
  MISC_FEATURE (138)..(138): Xaa = any amino acid
  MISC_FEATURE (139)..(139): Xaa = any amino acid
MGSRLDKSKVINSALELLNEVGIEGLTTRKLAQKLGVEQPTLYWHVKNKRALLDAXAIEMLDRHATHYCPLEGESWQDFLRNNAKSMRCALLSHRDGAKVCLGTGFTEQXYETAENSLAFLCQQGFSLENAMYAMQAXXIYTLGCVLLDQELQVAKEERETPTTDSMPPLVRQALELKDHQGAEPAFLFGLELIICGLEKQLKCESGS

SEQ ID NO: 215 - protein, 208 aa, Artificial Sequence
  synthetic construct; Sulfonylurea responsive repressor
MGSRLDKSKVINSALELLNEVGIEGLTTRKLAQKLGVEQPTLYWHVKNKRALLDAMAIEMLDRHATHYGPLEGESWQDFLRNNAKSMRCALLSHRDGAKVCLGTGFTEQQYETAENSMAFLCQQGFSLENAMYAMQAVCIYTLGCVLLDQELQVAKEERETPTTDSMPPLVRQVLELKDHQGAEPAFLFGLELIICGLEKQLKCESGS

SEQ ID NO: 216 - protein, 208 aa, Artificial Sequence
  synthetic construct; Sulfonylurea responsive repressor
  MISC_FEATURE (10)..(10): Xaa = any amino acid
MGSRLDKSKXINSALELLNEVGIEGLTTRKLAQKLGVEQPTLYWHVKNKRALLDAMAIEMLDRHATHYCPLEGESWQDFLRNNAKSMRCALLSHRDGAKVCLGTGFTEKMYEGAENSMAFLCQQGFSLEHAMYAMQAAGIFTLGCVLLDQELQVAKEERETPTTDSMPPLVRQALELKDHQGAEPAFLFGLELIICGLEKQLKCESGS

SEQ ID NO: 217 - protein, 208 aa, Artificial Sequence
  synthetic construct; Sulfonylurea responsive repressor
MGSRLDKSKVINSALELLNEVGIEGLTTRKLAQKLGVEQPTLYWHVKNKRALLDAMAIEMLDRHATHYCPLEGESWQDFLRNNAKSMRCALLSHRDGAKVCLGTGFTEQQYETAENSLAFLCQQGFSLEHAMYAMQAVGIFTLGCVLLDQELQVAKEERETPTTDSMPPLVRQALELKDHQGAEPAFLFGLELIICGLEKQLKCESGS

SEQ ID NO: 218 - protein, 208 aa, Artificial Sequence
  synthetic construct; Sulfonylurea responsive repressor
MGSRLDKSKAINSALELLNEVGIEGLTTRKLAQKLGVEQPTLYWHVKNKRALLDAMAIEMLDRHATHVCPLEGESWQDFLRNNAKIMRCALLSHRDGAKVCLGTGFTEQQYETAENSLAFLCQQGFSLEHALYAMQAAGIFTLGCVLLDQELQVAKEERETPTTDSMPPLVRQALELNDHQGAEPAFLFGLELIICGLEKQLKCESGS

SEQ ID NO: 219 - protein, 208 aa, Artificial Sequence
  synthetic construct; Sulfonylurea responsive repressor
MGSRLDKSKAINSALELLNEVGIEGLTTRKLAQKLGVEQPTLYWHVKNKRALLDALAIEMLDRHATHYCPLEGESWQDFLRNNAKSMRCALLSHRDGAKVCLGTGFTEQMYETAENSMAFLCQQGFSLENAMYAMQAAGIYTLGCVLLDQELQVAKEERETPTTDSMPPLVRQVLELKDHQGAEPAFLFGLELIICGLEKQLKCESGS

SEQ ID NO: 220 - protein, 208 aa, Artificial Sequence
  synthetic construct; Sulfonylurea responsive repressor
MGSRLDKSKVINSALELLNEVGIEGLTTRKLAQKLGVEQPTLYWHVKNKRALLDAMAIEMLDRHATHYCPLEGKSWQDFLRNNAKSMRCALLSHRDGAKVCLGTGFTEQQYESAENSMAFLCQQGFSLEHAMYAMQAAGIFTLGCVLLDQELQVAKEERETPTTDSMPPLLRQALELKDHQGAEPAFLFGLELIICGLEKQLKCESGS

SEQ ID NO: 221 - protein, 208 aa, Artificial Sequence
  synthetic construct; Sulfonylurea responsive repressor
  MISC_FEATURE (10)..(10): Xaa = any amino acid
MGSRLDKSKXINSALELLNEVGIEGLTTRKLAQKLGVEQPTLYWHVKNKRALLDALAIEMLDRHATHYCPLEGESWQDFLRNNAKSMRCALLSHRDGAKVCLGTGFTEQMYESAENSLAFLCQQGFSLEHAMYAMQAAGIYTLGCVLLDQELQVAKEERETPTTDSMPPLVRQGLELKDHQGAEPAFLFGLELIICGLEKQLKCESGS

SEQ ID NO: 222 - protein, 208 aa, Artificial Sequence
  synthetic construct; Sulfonylurea responsive repressor
MGSRLDKSKAINSALELLNEVGIEGLTTRKLAQKLGVEQPTLYWHVKNKRALLDAMAIEMLDRHATHYCPLEGESWQDFLRNNAKSMRCALLSHRDGAKVCLGTGFTEQQYEGAENSMAFLCQQGFSLENAMYAMQAVGIFTLGCVLLDQELQVAKEERETPTTDSMPPLVRQGLELKDHQGAEPAFLFGLELIICGLEKQLKCESGS

SEQ ID NO: 223 - protein, 208 aa, Artificial Sequence
  synthetic construct; Sulfonylurea responsive repressor
  MISC_FEATURE (10)..(10): Xaa = any amino acid
MGSRLDKSKXINSALELLNEVGIEGLTTRKLAQKLGVEQPTLYWHVKNKRALLDAMAIEMLDRHATHYCPLEGESWQDFLRNNAKSMRCALLSHRDGAKVCLGTGFTEQQYETAENSLAFLCQQGFSLEHALYAMQAVGIYTLGCVLLDQELQVAKEERETPTTDSMPPLARQALELKDHQGAEPAFLFGLELIICGLEKQLKCESGS

SEQ ID NO: 224 - protein, 208 aa, Artificial Sequence
  synthetic construct; Sulfonylurea responsive repressor
  MISC_FEATURE (10)..(10): Xaa = any amino acid
MGSRLDKSKXINSALELLNEVGIEGLTTRKLAQKLGVEQPTLYWHVKNKRALLDALAIEMLDRHATHYCPLEGESWQDFLRNNAKSMRCALLSHRDGAKVCLGTGFTEQHYETAENSMAFLCQQGFSLENALYAMQAVGIFTLGCVLLDQELQVAKEERETPTTDSMPPLVRQALELKDHQGAEPAFLFGLELIICGLEKQLKCESGS

SEQ ID NO: 225 - protein, 208 aa, Artificial Sequence
  synthetic construct; Sulfonylurea responsive repressor
  MISC_FEATURE (10)..(10): Xaa = any amino acid
MGSRLDKSKXINSALELLNEVGIEGLTTRKLAQKLGVEQPTLYWHVKNKRALLDAMAIEMLDRHATHYCPLEGESWQDFLRNNAKSMRCALLSHRDGAKVCLGTGFTEQQYESAENSMAFLCQQGFSLENAMYAMQAVGIYTLGCVLLDQELQVAKEERETPTTDSMPPLLRQVLELKDHQGAEPAFLFGLELIICGLEKQLKCESGS

SEQ ID NO: 226 - protein, 208 aa, Artificial Sequence
  synthetic construct; Sulfonylurea responsive repressor
  MISC_FEATURE (10)..(10): Xaa = any amino acid
MGSRLDKSKXINSALELLNEVGIEGLTTRKLAQKLGVEQPTLYWHVKNKRALLDALAIEMLDRHATHYCPLEGESWQDFLRNNAKSMRCALLSHRDGAKVCLGTGFTEKQYEAAENSLAFLCQQGFSLEHALYAMQAAGIYTLGCVLLDQELQVAKEERETPTTDSMPPLVRQALELKDHQGAEPAFLFGLELIICGLEKQLKCESGS

SEQ ID NO: 227 - protein, 208 aa, Artificial Sequence
  synthetic construct; Sulfonylurea responsive repressor
MGSRLDKSKVINSALELLNEVGIEGLTTRKLAQKLGVEQPTLYWHVKNKRALLDAMAIEMLDRHATHYCPLEGESWQDFLRNNAKSMRCALLSHRDGAKVCLGTGFTEQHYETAENSMAFLCQQGFSLEHALYAMQAAGIYTLGCVLLDQELQVAKEERETPTTDSMPPLVRQALELKDHQGAEPAFLFGLELIICGLEKQLKCESGS

SEQ ID NO: 228 - protein, 208 aa, Artificial Sequence
  synthetic construct; Sulfonylurea responsive repressor
  MISC_FEATURE (10)..(10): Xaa = any amino acid
MGSRLDKSKXINSALELLNEVGIEGLTTRKLAQKLGVEQPTLYWHVKNKRALLDAMAIEMLDRHATHYCPLEGESWQDFLRNNAKSMRCALLSHRDGAKVCLGTGFTEQHYETAENSMAFLCQQGFSLENAMYAMQAVGIYTLGCVLLDQELQVAKEERETPTTDSMPPLVRQALELKDHQGAEPAFLFGLELIICGLEKQLKCESGS

SEQ ID NO: 229 - protein, 208 aa, Artificial Sequence
  synthetic construct; Sulfonylurea responsive repressor
MGSRLDKSKVINSALELLNEVGIEGLTTRKLAQKLGVEQPTLYWHVKNKRALLDAMAIEMLDRHATHYCPLEGESWQDFLRNNAKSMRCALLSHRDGAKVCLGTGFTEQQYETAENSMAFLCKQGFSLENAMYAMQAVGIYTLGCVLLDQELQVAKEERETPTTDSMPPLVRQVLELKDHQGAEPAFLFGLELIICGLEKQLKCESGS

SEQ ID NO: 230 - protein, 208 aa, Artificial Sequence
  synthetic construct; Sulfonylurea responsive repressor
  misc_feature (56)..(56): Xaa can be any naturally occurring amino acid
  MISC_FEATURE (113)..(113): Xaa = any amino acid
  MISC_FEATURE (118)..(118): Xaa = any amino acid
  MISC_FEATURE (174)..(174): Xaa = any amino acid
MGSRLDKSKVINSALELLNEVGIEGLTTRKLAQKLGVEQPTLYWHVKNKRALLDAXAIEMLDRHATHYCPLEGESWQDFLRNNAKSMRCALLSHRDGAKVCLGTGFTEQHYEXAENSXAFLCQQGFSLEHALYAMQAVGIYTLGCVLLDQELQVAKEERETPTTDSMPPLVRQXLELKDHQGAEPAFLFGLELIICGLEKQLKCESGS

SEQ ID NO: 231 - protein, 208 aa, Artificial Sequence
  synthetic construct; Sulfonylurea responsive repressor
MGSRLDKSKVINSALELLNEVGIEGLTTRKLAQKLGVEQPTLYWHVKNKRALLDALAIEMLDRHATHYCPLEGESWQDFLRNNAKSMRCALLSHRDGAKVCLGTGFTEQHYESAENSLAFLCQQGFSLENAMYAMQAVGIFTLGCVLLDQELQVAKEERETPTTDSMPPLVRQVLELKDHQGAEPAFLFGLELIICGLEKQLKCESGS

SEQ ID NO: 232 - protein, 208 aa, Artificial Sequence
  synthetic construct; Sulfonylurea responsive repressor
MGSRLDKSKAINSALELLNEVGIEGLTTRKLAQKLGVEQPTLYWHVKNKRALLDAMAIEMLDRHATHYCPLEGESWQDFLRNNAKSMRCALLSHRDGAKVCLGTGFTEQQYETAENSLAFLCQQGFSLENALYAMQAVGIYTLGCVLLDQELQVAKEERETPTTDSMPPLVRQVLELKDHQGAEPAFLFGLELIICGLEKQLKCESGS

SEQ ID NO: 233 - protein, 208 aa, Artificial Sequence
  synthetic construct; Sulfonylurea responsive repressor
MGSRLDKSKVINSALELLNEVGIEGLTTRKLAQKLGVEQPTLYWHVKNKRALLDAMAIEMLDRHATHYCPLEGESWQDFLRNNAKSMRCALLSHRDGAKVCLGTGFTEQQYEAAENSMAFLCQQDFSLEHAMYAMQAVGIYTLGCVLLDQELQVAKEERETPTTDSMPPLVRQGLELKDHQGAEPAFLFGLELIICGLEKQLKCESGS

SEQ ID NO: 234 - protein, 208 aa, Artificial Sequence
  synthetic construct; Sulfonylurea responsive repressor
  MISC_FEATURE (113)..(113): Xaa = any amino acid
MGSRLDKSKVINSALELLNEVGIEGLTTRKLAQKLGVEQPTLYWHVKNKRALLDAMAIEMLDRHATHYCPLEGKSWQDFLRNNAKSMRCALLSHRDGAKVCLGTGFTEQHYEXAENSMAFLCQQGFSLEHAMYAMQAAGIFTLGCVLLDQELQVAKEERETPTTDSMPPLLRQALELKDHQGAEPAFLFGLELIICGLEKQLKCESGS

SEQ ID NO: 235 - protein, 208 aa, Artificial Sequence
  synthetic construct; Sulfonylurea responsive repressor
MGSRLDKSKVINSALELLNEVGIEGLTTRKLAQKLGVEQPTLYWHVKNKRALLDAMAIEMLDRHATHYCPLEGESWQDFLRNNAKSMRCALLSHRDGAKVCLGTGFTEQQYETAENSLAFLCQQGFSLEHAMYAMQAAGIYTLGCVLLDQELQVAKEERETPTTDSMPPLVRQALELKDHQGAEPAFLFGLELIICGLEKQLKCESGS

SEQ ID NO: 236 - protein, 208 aa, Artificial Sequence
  synthetic construct; Sulfonylurea responsive repressor
  MISC_FEATURE (10)..(10): Xaa = any amino acid
MGSRLDKSKXINSALELLNEVGIEGLTTRKLAQKLGVEQPTLYWHVKNKRALLDAMAIEMLDRHATHYCPLEGESWQDFLRNNAKSMRCALLSHRDGAKVCLGTGFTEQQYETAENSMAFLCQQGFSLENALYAMQAVGIYTLGCVLLDQELQVAKEERETPTTDSMPPLVRQALELKDHQGAEPAFLFGLELIICGLEKQLKCESGS

SEQ ID NO: 237 - protein, 208 aa, Artificial Sequence
  synthetic construct; Sulfonylurea responsive repressor
MGSRLDKSKAINSALELLNEVGIEGLTTRKLAQKLGVEQPTLYWHVKNKRALLDALAIEMLDRHATHYCPLEGESWQDFLRNNAKSMRCALLSHRDGAKVCLGTGFTEKHYETAENSMAFLCQQGFSLEHAMYAMQAVGIYTLGCVLLDQELQVAKEERETPTTDSMPPLVRQVLELKDHQGAEPAFLFGLELIICGLEKQLKCESGS

SEQ ID NO: 238 - protein, 208 aa, Artificial Sequence
  synthetic construct; Sulfonylurea responsive repressor
  MISC_FEATURE (10)..(10): Xaa = any amino acid
MGSRLDKSKXINSALELLNEVGIEGLTTRKLAQKLGVEQPTLYWHVKNKRALLDALAIEMLDRHATHYCPLEGESWQDFLRNNAKSMRCALLSHRDGAKVCLGTGFTEKQYEAAENSMAFLCQQGFSLEHAMYAMQAAGIYTLGCVLLDQELQVAKEERETPTTDSMPPLVRQVLELKDHQGAEPAFLFGLELIICGLEKQLKCESGS

SEQ ID NO: 239 - protein, 208 aa, Artificial Sequence
  synthetic construct; Sulfonylurea responsive repressor
  MISC_FEATURE (10)..(10): Xaa = any amino acid
MGSRLDKSKXINSALELLNEVGIEGLTTRKLAQKLGVEQPTLYWHVKNKRALLDAMAIEMLDRHATHYCPLEGESWQDFLRNNAKSMRCALLSHRDGAKVCLGTGFTEQQYETAENSMAFLCQQGFSLENAMYAMQAACIYTLGCVLLDQELQVAKEERETPTTDSMPPLVRQVLELKDHQGAEPAFLFGLELIICGLEKQLKCESGS

SEQ ID NO: 240 - protein, 208 aa, Artificial Sequence
  synthetic construct; Sulfonylurea responsive repressor
  MISC_FEATURE (10)..(10): Xaa = any amino acid
MGSRLDKSKXINSALELLNEVGIEGLTTRKLAQKLGVEQPTLYWHVKNKRALLDAMAIEMLDRHATHYCPLEGESWQDFLRNNAKSMRCALLSHRDGAKVCLGTGFTEQQYETAENSLAFLCQQGFSLEHALYAMQAAGIFTLGCVLLDQELQVAKEERETPTTDSMPPLVRQALELKDHQGAEPAFLFGLELIICGLEKQLKCESGS

SEQ ID NO: 241 - protein, 208 aa, Artificial Sequence
  synthetic construct; Sulfonylurea responsive repressor
  MISC_FEATURE (10)..(10): Xaa = any amino acid
MGSRLDKSKXINSALELLNEVGIEGLTTRKLAQKLGVEQPTLYWHVKNKRALLDAMAIEMLDRHATHVCPLEGESWQDFLRNNAKSMRCALLSHRDGAKVCLGTGFTEQQYEGAENSMAFLCQQGFSLEHAMYAMQAVGIYTLGCVLLDQELQVAKEERETPTTDSMPPLVRQALELKDHQGAEPAFLFGLELIICGLEKQLKCGSGS

SEQ ID NO: 242 - protein, 208 aa, Artificial Sequence
  synthetic construct; Sulfonylurea responsive repressor
MGSRLDKSKVINSALELLNEVGIEGLTTRKLAQKLGVEQPTLYWHVKNKRALLDALAIEMLDRHATHICPLEGESWQDFLRNNAKSMRCALLSHRDGAKVCLGTGFTEQMYETAENSMAFLCQQGFSLENAMYAMQAAGIFTLGCVLLDQELQVAKEERETPTTDSMPPLVRQVLELKDHQGAEPAFLFGLELIICGLEKQLKCESGS

SEQ ID NO: 243 - protein, 208 aa, Artificial Sequence
  synthetic construct; Sulfonylurea responsive repressor
  MISC_FEATURE (10)..(10): Xaa = any amino acid
MGSRLDKSKXINSALELLNEVGIEGLTTRKLAQKLGVEQPTLYWHVKNKRALLDALAIEMLDRHATHYCPLEGESWQDFLRNNAKSMRCALLSHRDGAKVCLGTGFTEQMYESAENSLAFLCQQGFSLEHAMYAMQAAGIFTLGCVLLDQELQVAKEERETPTTDSMPPLVRQVLELKDHQGAEPAFLFGLELIICGLEKQLKCESGS

SEQ ID NO: 244 - protein, 208 aa, Artificial Sequence
  synthetic construct; Sulfonylurea responsive repressor
  MISC_FEATURE (199)..(199): Xaa = any amino acid
MGSRLDKSKVINSALELLNEVGIEGLTTRKLAQKLGVEQPTLYWHVKNKRALLDAMAIEMLDRHATHYCPLEGESWQDFLRNNAKSMRCALLSHRDGAKVCLGTGFTEQHYESAENSMAFLCQQGFSLEHAMYAMQAAGIYTLGCVLLDQELQVAKEERQTPTTDSMPPLVRQALELKDHQGAEPAFLFGLELIICGLXKQLKCESGS

SEQ ID NO: 245 - protein, 208 aa, Artificial Sequence
  synthetic construct; Sulfonylurea responsive repressor
  MISC_FEATURE (10)..(10): Xaa = any amino acid
MGSRLDKSKXINSALELLNEVGIEGLTTRKLAQKLGVEQPTLYWHVKNKRALLDAMAIEMLDRHATHLCPLEGESWQDFLRNNAKSMRCALLSHRDGAKVCLGTGFTEQQYETAENSMAFLCQQGFSLEHAMYAMQAVGIYTLGCVLLDQELQVAKEERETPTTDSMPPLLRQALELKDHQGAEPAFLFGLELIICGLEKQLKCESGS

SEQ ID NO: 246 - protein, 208 aa, Artificial Sequence
  synthetic construct; Sulfonylurea responsive repressor
  misc_feature (56)..(56): Xaa can be any naturally occurring amino acid
  MISC_FEATURE (110)..(110): Xaa = any amino acid
MGSRLDKSKVINSALELLNEVGIEGLTTRKLAQKLGVEQPTLYWHVKNKRALLDAXAIEMLDRHATHYCPLEGESWQDFLRNNAKSMRCALLSHRDGAKVCLGTGFTEQXYEAAENSMAFLCQQGFSLEHAMYAMQAAGIYTLGCVLLDQELQVAKEERETPTTDSMPPLVRQVLELKDHQGAEPAFLFGLELIICGLEKQLKCESGS

SEQ ID NO: 247 - protein, 208 aa, Artificial Sequence
  synthetic construct; Sulfonylurea responsive repressor
  MISC_FEATURE (171)..(171): Xaa = any amino acid
MGSRLDKSKVINSALELLNEVGIEGLTTRKLAQKLGVEQPTLYWHVKNKRALLDAMAIEMLDRHATHYCPLEGESWQDFLRNNAKSMRCALLSHRDGAKVCLGTGFTEQQYETAENSMAFLCQQGFSLEHALYAMQAAGIYTLGCVLLDQELQVAKEERETPTTDSMPPLXRQVLELKDHQGAEPAFLFGLELIICGLEKQLKCESGS

SEQ ID NO: 248 - protein, 208 aa, Artificial Sequence
  synthetic construct; Sulfonylurea responsive repressor
  MISC_FEATURE (10)..(10): Xaa = any amino acid
MGSRLDKSKXINSALELLNEVGIEGLTTRKLAQKLGVEQPTLYWHVKNKRALLDAMAIEMLDRHATHYCPLEGESWQDFLRNNAKSMRCALLSHRDGAKVCLGTGFTEQQYETAENSLAFLCQQGFSLEHAMYAMQAVGIFTLGCVLLDQELQVAKEERETPTTDSMPPLVRQVLELKDHQGAEPAFLFGLELIICGLEKQLKCESGS

SEQ ID NO: 249 - protein, 208 aa, Artificial Sequence
  synthetic construct; Sulfonylurea responsive repressor
MGSRLDKSKVINSALELLNEVGIEGLTTRKLAQKLGVEQPTLYWHVKNKRALLDAMAIEMLDRHATHYCPLEGESWQDFLRNNAKSMRCALLSHRDGAKVCLGTGFTEQQYETAENSLAFLCQQGFSLENALYAMQAVGIYTLGCVLLDQELQVAKEERETPTTDSMPPLVRQALELKDHQGAEPAFLFGLELIICGLEKQLKCESGS

SEQ ID NO: 250 - protein, 208 aa, Artificial Sequence
  synthetic construct; Sulfonylurea responsive repressor
MGSRLDKSKVINSALELLNEVGIEGLTTRKLAQKLGVEQPTLYWHVKNKRALLDAMAIEMLDRHATHYCPLEGESWQDFLRNNAKSMRCALLSHRDGAKVCLGTGFTEQHYETAENSLAFLCQQGFSLEHAMYAMQAVGIYTLGCVLLDQELQVAKEERETPTTDSMPPLVRQALELKDHQGAEPAFLFGLELIICGLEKQLKCESGS

SEQ ID NO: 251 - protein, 208 aa, Artificial Sequence
  synthetic construct; Sulfonylurea responsive repressor
  MISC_FEATURE (10)..(10): Xaa = any amino acid
MGSRLDKSKXINSALELLNEVGIEGLTTRKLAQKLGVEQPTLYWHVKNKRALLDAMAIEMLDRHATHYCPLEEESWQDFLRNNAKSMRCALLSHRDGAKVCLGTGFTEQQYEAAENSMAFLCQQGFSLEHALYAMQAAGIYTLGCVLLDQELQVAKEERETPTTDSMPPLVRQALELKDHQGAEPAFLFGLELIICGLEKQLKCESGS

SEQ ID NO: 252 - protein, 208 aa, Artificial Sequence
  synthetic construct; Sulfonylurea responsive repressor
MGSRLDKSKVINSALELLNEVGIEGLTTRKLAQKLGVEQPTLYWHVKNKRALLDAMAIEMLDRHATHYCPLEGESWQDFLRNNAKSMRCALLSHRDGAKVCLGTGFTEQQYETAENSLAFLCQQGFSLENAMYAMQAAGIYTLGCVLLDQELQVAKEERETPTTDSMPPLVRQGLELKDHQGAEPAFLFGLELIICGLEKQLKCESGS

SEQ ID NO: 253 - protein, 208 aa, Artificial Sequence
  synthetic construct; Sulfonylurea responsive repressor
MGSRLDKSKAINSALELLNEVGIEGLTTRKLAQKLGVEQPTLYWHVKNKRALLDALAIEMLDRHATHYCPLEGESWQDFLRNNAKSMRCALLSHRDGAKVCLGTGFTEQHYETAENSLAFLCQQGFSLENAMYAMQAVGIFTLGCVLLDQELQVAKEERETPTTDSMPPLVRQVLELKDHQGAEPAFLFGLELIICGLEKQLKCESGS

SEQ ID NO: 254 - protein, 208 aa, Artificial Sequence
  synthetic construct; Sulfonylurea responsive repressor
MGSRLDKSKVINSALELLNEVGIEGLTTRKLAQKLGVEQPTLYWHVKNKRALLDAMAIEMLDRHATHYCPLEGESWQDFLRNNAKSMRCALLSHRDGAKVCLGTGFTEQQYESAENSLAFLCQQGFSLENAMYAMQAAGIYTLGCVLLDQELQVAKEERETPTTDSMPPLLRQALELKDHQGAEPAFLFGLELIICGLEKQLKCESGS

SEQ ID NO: 255 - protein, 208 aa, Artificial Sequence
  synthetic construct; Sulfonylurea responsive repressor
  MISC_FEATURE (10)..(10): Xaa = any amino acid
MGSRLDKSKXINSALELLNEVGIEGLTTRKLAQKLGVEQPTLYWHVKNKRALLDAMAIEMLDRHATHYCPLEGESWQDFLRNNAKSMRCALLSQRDGAKVCLGTGFTEQQYEGAENSLAFLCQQGFSLEHALYAMQAAGIFTLGCVLLDQELQVAKEERETPTTDSMPPLVRQALELKDHQGAEPAFLFGLELIICGLEKQLKCESGS

SEQ ID NO: 256 - protein, 208 aa, Artificial Sequence
  synthetic construct; Sulfonylurea responsive repressor
MGSRLDKSKVINSALELLNEVGIEGLTTRKLAQKLGVEQPTLYWHVKNKRALLDAMAIEMLDRHATHYCPLEGESWQDFLRNNAKSMRCALLSHRDGAKVCLGTGFTEQQYETAENSMAFLCQQGFSLENALYAMQAAGIYTLGCVLLDQELQVAKEERETPTTDSMPPLVRQGLELKDHQGAEPAFLFGLELIICGLEKQLKCESGS

SEQ ID NO: 257 - protein, 208 aa, Artificial Sequence
  synthetic construct; Sulfonylurea responsive repressor
MGSRLDKSKVINSALELLNEVGIEGLTTRKLAQKLGVEQPTLYWHVKNKRALLDALAIEMLDRHATHYCPLEGESWQDFLRNNAKSMRCALLSHRDGAKVCLGTGFTEQMYESAENSMAFLCQQGFSLENAMYAMQAAGIYTLGCVLLDQELQVAKEERETPTTDSMPPLVRQGLELKDHQGAEPAFLFGLELIICGLEKQLKCESGS

SEQ ID NO: 258 - protein, 208 aa, Artificial Sequence
  synthetic construct; Sulfonylurea responsive repressor
MGSRLDKSKVINSALELLNEVGIEGLTTRKLAQKLGVEQPTLYWHVKNKRALLDAMAIEMLDRHATHYCPLEGESWQDFLRNNAKSMRCALLSHRDGAKVCLGTGFTEQQYEGAENSMAFLCQQGFSLENAMYAMQAVGIFTLGCVLLDQELQVAKEERETPTTDSMPPLVRQALELKDHQGAEPAFLFGLELIICGLEKQLKCESGS

SEQ ID NO: 259 - protein, 208 aa, Artificial Sequence
  synthetic construct; Sulfonylurea responsive repressor
  MISC_FEATURE (68)..(68): Xaa = any amino acid
  MISC_FEATURE (110)..(110): Xaa = any amino acid
  MISC_FEATURE (113)..(113): Xaa = any amino acid
  MISC_FEATURE (132)..(132): Xaa = any amino acid
MGSRLDKSKVINSALELLNEVGIEGLTTRKLAQKLGVEQPTLYWHVKNKRALLDALAIEMLDRHATHXCPLEGESWQDFLRNNAKSMRCALLSHRDGAKVCLGTGFTEQXYEXAENSMAFLCQQGFSLEHAXYAMQAAGIFTLGCVLLDQELQVAKEERETPTTDSMPPLLRQALELKDHQGAEPAFLFGLELIICGLEKQLKCESGS

SEQ ID NO: 260 - protein, 208 aa, Artificial Sequence
  synthetic construct; Sulfonylurea responsive repressor
MGSRLDKSKVINSALELLNEVGIEGLTTRKLAQKLGVEQPTLYWHVKNKRALLDAMAIEMLDRHATHICPLEGESWQDFLRNNAKSMRCALLSHRDGAKVCLGTGFTEQQYETAENSLAFLCQQGFSLENALYAMQAAGIFTLGCVLLDQELQVAKEERETPTTDSMPPLVRQVLELKDHQGAEPAFLFGLELIICGLEKQLKCESGS

SEQ ID NO: 261 - protein, 208 aa, Artificial Sequence
  synthetic construct; Sulfonylurea responsive repressor
  MISC_FEATURE (68)..(68): Xaa = any amino acid
  MISC_FEATURE (113)..(113): Xaa = any amino acid
  MISC_FEATURE (130)..(130): Xaa = any amino acid
  MISC_FEATURE (139)..(139): Xaa = any amino acid
  MISC_FEATURE (171)..(171): Xaa = any amino acid
  misc_feature (174)..(174): Xaa can be any naturally occurring amino acid
MGSRLDKSKVINSALELLNEVGIEGLTTRKLAQKLGVEQPTLYWHVKNKRALLDALAIEMLDRHATHXCPLEGESWQDFLRNNAKSMRCALLSHRDGAKVCLGTGFTEQLYEXAENSLAFLCQQGFSLEXALYAMQAAXIYTLGCVLLDQELQVAKEERETPTTDSMPPLXRQXLELKDHQGAEPAFLFGLELIICGLEKQLKCESGS

SEQ ID NO: 262 - protein, 208 aa, Artificial Sequence
  synthetic construct; Sulfonylurea responsive repressor
MGSRLDKSKVINSALELLNEVGIEGLTTRKLAQKLGVEQPTLYWHVKNKRALLDALAIEMLDRHATHYCPLEGESWQDFLRNNAKSMRCALLSHRDGAKVCLGTGFTEKQYESAENSLAFLCQQGFSLEHAMYAMQAAGIYTLGCVLLDQELQVAKEERETPTTDSMPPLVRQALELKDHQGAEPAFLFGLELIICGLEKQLKCESGS

SEQ ID NO: 263 - protein, 208 aa, Artificial Sequence
  synthetic construct; Sulfonylurea responsive repressor
  MISC_FEATURE (171)..(171): Xaa = any amino acid
MGSRLDKSKVINSALELLNEVGIEGLTTRKLAQKLGVEQPTLYWHVKNKRALLDAMAIEMLDRHATHYCPLEGESWQDFLRNNAKSMRCALLSHRDGAKVCLGTGFTEQQYESAENSMAFLCQQGFSLEHAMYAMQAAGIYTLGCVLLDQELQVAKEERETPTTDSMPPLXRQVLELKDHQGAEPAFLFGLELIICGLEKQLKCESGS

SEQ ID NO: 264 - protein, 208 aa, Artificial Sequence
  synthetic construct; Sulfonylurea responsive repressor
  MISC_FEATURE (56)..(56): Xaa = any amino acid
  MISC_FEATURE (118)..(118): Xaa = any amino acid
  MISC_FEATURE (139)..(139): Xaa = any amino acid
MGSRLDKSKVINSALELLNEVGIEGLTTRKLAQKLGVEQPTLYWHVKNKRALLDAXAIEMLDRHATHYCPLEGESWQDFLRNNAKSMRCALLSHRDGAKVCLGTGFTEQMYETAENSXAFLCQQGFSLEHAMYAMQAAXIYTLGCVLLDQELQVAKEERETPTTDSMPPLARQGLELKDHQGAEPAFLFGLELIICGLEKQLKCESGS

SEQ ID NO: 265 - protein, 208 aa, Artificial Sequence
  synthetic construct; Sulfonylurea responsive repressor
  MISC_FEATURE (110)..(110): Xaa = any amino acid
MGSRLDKSKVINSALELLNEVGIEGLTTRKLAQKLGVEQPTLYWHVKNKRALLDAMAIEMLDRHATHYCPLEGESWQDFLRNNAKSMRCALLSHRDGAKVCLGTGFTEQXYEAAENSMAFLCQQGFSLEHAMYAMQAAGIFTLGCVLLDQELQVAKEERETPTTDSMPPLVRQALELKDHQGAEPAFLFGLELIICGLEKQLKCESGS

SEQ ID NO: 266 - protein, 208 aa, Artificial Sequence
  synthetic construct; Sulfonylurea responsive repressor
  MISC_FEATURE (68)..(68): Xaa = any amino acid
MGSRLDKSKVINSALELLNEVGIEGLTTRKLAQKLGVEQPTLYWHVKNKRALLDAMAIEMLDRHATHXCPLEGESWQDFLRNNAKSMRCALLSHRDGAKVCLGTGFTEQQYEGAENSLAFLCQQGFSLEHAMYAMQAVGIYTLGCVLLDQELQVAKEERETPTTDSMPPLVRQGLELKDHQGAEPAFLFGLELIICGLEKQLKCESGS

SEQ ID NO: 267 - protein, 208 aa, Artificial Sequence
  synthetic construct; Sulfonylurea responsive repressor
  MISC_FEATURE (110)..(110): Xaa = any amino acid
  MISC_FEATURE (113)..(113): Xaa = any amino acid
  MISC_FEATURE (141)..(141): Xaa = any amino acid
  MISC_FEATURE (199)..(199): Xaa = any amino acid
MGSRLDKSKVINSALELLNEVGIEGLTTRKLAQKLGVEQPTLYWHVKNKRALLDAMAIEMLDRHATHYCPLEGESWQDFLRNNAKSMRCALLSHRDGAKVCLGTGFTEQXYEXAENSLAFLCQQGFSLEHAMYAMQAAGIXTLGCVLLDQELQVAKEERETPTTDSMPPLARQGLELKDHQGAEPAFLFGLELIICGLXKQLKCESGS

SEQ ID NO: 268 - protein, 208 aa, Artificial Sequence
  synthetic construct; Sulfonylurea responsive repressor
  MISC_FEATURE (154)..(154): Xaa = any amino acid
  MISC_FEATURE (195)..(195): Xaa = any amino acid
  MISC_FEATURE (199)..(199): Xaa = any amino acid
MGSRLDKSKVINSALELLNEVGIEGLTTRKLAQKLGVEQPTLYWHVKNKRALLDAMAIEMLDRHATHYCPLEGESWQDFLRNNAKSMRCALLSHRDGAKVCLGTGFTEQQYESAENSMAFLCQQGFSLEHAMYAMQAAGIYTLGCVLLDQELQXAKEERETPTTDSMPPLLRQVLELNDHQGAEPAFLFGLELIXCGLXKQLKCESGS

SEQ ID NO: 269 - protein, 208 aa, Artificial Sequence
  synthetic construct; Sulfonylurea responsive repressor
  MISC_FEATURE (93)..(93): Xaa = any amino acid
  MISC_FEATURE (154)..(154): Xaa = any amino acid
  MISC_FEATURE (161)..(161): Xaa = any amino acid
  MISC_FEATURE (166)..(166): Xaa = any amino acid
  MISC_FEATURE (173)..(173): Xaa = any amino acid
  MISC_FEATURE (186)..(186): Xaa = any amino acid
  MISC_FEATURE (195)..(195): Xaa = any amino acid
  MISC_FEATURE (200)..(200): Xaa = any amino acid
  MISC_FEATURE (201)..(201): Xaa = any amino acid
MGSRLDKSKVINSALELLNEVGIEGLTTRKLAQKLGVEQPTLYWHVKNKRALLDAMAIEMLDRHATHYCPLEGESWQDFLRNNAKSMRCALLXHRDGAKVCLGTGFTEQQYEGAENSLAFLCQQGFSLEHAMYAMQAAGIYTLGCVLLDQELQXAKEEREXPTTDXMPPLARXGLELKDHQGPEPXFLFGLELIXCGLEXXLKCESGS

SEQ ID NO: 270 - protein, 208 aa, Artificial Sequence
  synthetic construct; Sulfonylurea responsive repressor
MGSRLDKSKVINSALELLNEVGIEGLTTRKLAQKLGVEQPTLYWHVKNKRALLDAMAIEMLDRHATHVCPLEGESWQDFLRNNAKSMRCALLSHRDGAKVCLGTGFTEQQYEGAENSMAFLCQQGFSLEHAMYAMQAVGIYTLGCVLLDQELQVAKEERETPTTDSMPPLVRQALELKDHQGAEPAFLFGLELIICGLEKQLKCGSGS

SEQ ID NO: 271 - protein, 208 aa, Artificial Sequence
  synthetic construct; Sulfonylurea responsive repressor
  MISC_FEATURE (56)..(56): Xaa = any amino acid
  misc_feature (68)..(68): Xaa can be any naturally occurring amino acid
  MISC_FEATURE (109)..(109): Xaa = any amino acid
  MISC_FEATURE (110)..(110): Xaa = any amino acid
  MISC_FEATURE (118)..(118): Xaa = any amino acid
  MISC_FEATURE (130)..(130): Xaa = any amino acid
  MISC_FEATURE (139)..(139): Xaa = any amino acid
  MISC_FEATURE (141)..(141): Xaa = any amino acid
MGSRLDKSKVINSALELLNEVGIEGLTTRKLAQKLGVEQPTLYWHVKNKRALLDAXAIEMLDRHATHXCPLEGESWQDFLRNNAKSMRCALLSHRDGAKVCLGTGFTEXXYEGAENSXAFLCQQGFSLEXAMYAMQAAXIXTLGCVLLDQELQVAKEERETPTTDSMPPLARQVLELKDHQGAEPAFLFGLELIICGLEKQLKCESGS

SEQ ID NO: 272 - protein, 208 aa, Artificial Sequence
  synthetic construct; Sulfonylurea responsive repressor
  MISC_FEATURE (109)..(109): Xaa = any amino acid
  MISC_FEATURE (110)..(110): Xaa = any amino acid
  MISC_FEATURE (132)..(132): Xaa = any amino acid
  MISC_FEATURE (138)..(138): Xaa = any amino acid
  MISC_FEATURE (171)..(171): Xaa = any amino acid
MGSRLDKSKVINSALELLNEVGIEGLTTRKLAQKLGVEQPTLYWHVKNKRALLDAMAIEMLDRHATHYCPLEGESWQDFLRNNAKSMRCALLSHRDGAKVCLGTGFTEXXYESAENSMAFLCQQGFSLEHAXYAMQAXGIYTLGCVLLDQELQVAKEERETPTTDSMPPLXRQALELKDHQGAEPAFLFGLELIICGLEKQLKCESGS

SEQ ID NO: 273 - protein, 208 aa, Artificial Sequence
  synthetic construct; Sulfonylurea responsive repressor
MGSRLDKSKVINSALELLNEVGIEGLTTRKLAQKLGVEQPTLYWHVKNKRALLDALAIEMLDRHATHYCPLEGESWQDFLRNNAKSMRCALLSHRDGAKVCLGTGFTEKQYETAENSMAFLCQQGFSLENALYAMQAVGIYTLGCVLLDQELQVAKEERETPTTDSMPPLVRQALELKDHQGAEPAFLFGLELIICGLEKQLKCESGS

SEQ ID NO: 274 - protein, 208 aa, Artificial Sequence
  synthetic construct; Sulfonylurea responsive repressor
MGSRLDKSKVINSALELLNEVGIEGLTTRKLAQKLGVEQPTLYWHVKNKRALLDALAIEMLDRHATHYCPLEGESWQDFLRNNAKSMRCALLSHRDGAKVCLGTGFTEQMYETAENSLAFLCQQGFSLEHAMYAMQAAGIFTLGCVLLDQELQVAKEERETPTTDSMPPLVRQVLELKDHQGAEPAFLFGLELIICGLEKQLKCESGS

SEQ ID NO: 275 - protein, 208 aa, Artificial Sequence
  synthetic construct; Sulfonylurea responsive repressor
  MISC_FEATURE (109)..(109): Xaa = any amino acid
MGSRLDKSKVINSALELLNEVGIEGLTTRKLAQKLGVEQPTLYWHVKNKRALLDAMAIEMLDRHATHYCPLEGESWQDFLRNNAKSMRCALLSHRDGAKVCLGTGFTEXLYESAENSLAFLCQQGFSLEHAMYAMQAVGIYTLGCVLLDQELQVAKEERETPTTDSMPPLVRQVLELKDHQGAEPAFLFGLELIICGLEKQLKCESGS

SEQ ID NO: 276 - protein, 208 aa, Artificial Sequence
  synthetic construct; Sulfonylurea responsive repressor
MGSRLDKSKVINSALELLNEVGIEGLTTRKLAQKLGVEQPTLYWHVKNKRALLDALAIEMLDRHATHYCPLEGESWQDFLRNNAKSMRCALLSHRDGAKVCLGTGFTEQMYETAENSMAFLCQQGFSLEHALYAMQAAGIFTLGCVLLDQELQVAKEERETPTTDSMPPLVRQALELKDHQGAEPAFLFGLELIICGLEKQLKCESGS

SEQ ID NO: 277 - protein, 208 aa, Artificial Sequence
  synthetic construct; Sulfonylurea responsive repressor
MGSRLDKSKVINSALELLNEVGIEGLTTRKLAQKLGVEQPTLYWHVKNKRALLDAMAIEMLDRHATHYCPLEGESWQDFLRNNAKSMRCALLSHRDGAKVCLGTGFTEQMYESAENSLAFLCQQGFSLENALYAMQAVGIYTLGCVLLDQELQVAKEERETPTTDSMPPLVRQVLELKDHQGAEPAFLFGLELIICGLEKQLKCESGS

SEQ ID NO: 278 - protein, 208 aa, Artificial Sequence
  synthetic construct; Sulfonylurea responsive repressor
MGSRLDKSKVINSALELLNEVGIEGLTTRKLAQKLGVEQPTLYWHVKNKRALLDAMAIEMLDRHATHFCPLEGESWQDFLRNNAKSMRCTLLSHRDGAKVCLGTGFTEQQYESAENSLAFLCQQGFSLENAMYAMQAVGIYTLGCVLLDQELQVAKEERETPTTDSMPPLVRQALELKDHQGAEPAFLFGLELIICGLEKQLKCESGS

SEQ ID NO: 279 - protein, 208 aa, Artificial Sequence
  synthetic construct; Sulfonylurea responsive repressor
MGSRLDKSKVINSALELLNEVGIEGLTTRKLAQKLGVEQPTLYWHVKNKRALLDALAIEMLDRHATHICPLEGESWQDFLRNNAKSMRCALLSHRDGAKVCLGTGFTEQMYEAAENSMAFLCQQGFSLENAMYAMQAAGIYTLGCVLLDQELQVAKEERETPTTDSMPPLVRQALELKDHQGAEPAFLFGLELIICGLEKQLKCESGS

SEQ ID NO: 280 - protein, 208 aa, Artificial Sequence
  synthetic construct; Sulfonylurea responsive repressor
MGSRLDKSKVINSALELLNEVGIEGLTTRKLAQKLGVEQPTLYWHVKNKRALLDAMAIEMLDRHATHYCPLEGESWQDFLRNNAKSMRCALLSHRDGAKVCLGTGFTEQHYETAENSLAFLCQQGFSLENAMYAMQAAGIYTLGCVLLDQELQVAKEERETPTTDSMPPLVRQVLELKDHQGAEPAFLFGLELIICGLEKQLKCESGS

SEQ ID NO: 281 - protein, 208 aa, Artificial Sequence
  synthetic construct; Sulfonylurea responsive repressor
MGSRLDKSKVINSALELLNEVGIEGLTTRKLAQKLGVEQPTLYWHVKNKRALLDAMAIEMLDRHATHLCPLEGESWQDFLRNNAKSMRCALLSHRDGAKVCLGTGFTEQQYETAENSMAFLCQQGFSLEHAMYAMQAAGIYTLGCVLLDQELQVAKEERETPTTDSMPPLVRQGLELKDHQGAEPAFLFGLELIICGLEKQLKCESGS

SEQ ID NO: 282 - protein, 208 aa, Artificial Sequence
  synthetic construct; Sulfonylurea responsive repressor
MGSRLDKSKVINSALELLNEVGIEGLTTRKLAQKLGVEQPTLYWHVKNKRALLDALAIEMLDRHATHFCPLEGESWQDFLRNNAKSMRCALLSHRDGAKVCLGTGFTEQMYEAAENSMAFLCQQGFSLEHAMYAMQAVCIYTLGCVLLDQELQVAKEERETPTTDSMPPLARQGLELKDHQGAEPAFLFGLELIICGLEKQLKCESGS

SEQ ID NO: 283 - protein, 208 aa, Artificial Sequence
  synthetic construct; Sulfonylurea responsive repressor
MGSRLDKSKVINSALELLNEVGIEGLTTRKLAQKLGVEQPTLYWHVKNKRALLDALAIEMLDRHATHYCPLEGESWQDFLRNNAKSMRCALLSHRDGAKVCLGTGFTEQHYETAENSLAFLCQQGFSLENAMYAMQAVGIFTLGCVLLDQELQVAKEERETPTTDSMPPLVRQVLELKDHQGAEPAFLFGLELIICGLEKQLKCESGS

SEQ ID NO: 284 - protein, 208 aa, Artificial Sequence
  synthetic construct; Sulfonylurea responsive repressor
MGSRLDKSKVINSALELLNEVGIEGLTTRKLAQKLGVEQPTLYWHVKNKRALLDAMAIEMLDRHATHYCPLEGESWQDFLRNNAKSMRCALLSHRDGAKVCLGTGFTEQQYESAENSLAFLCQQGFSLENAMYAMQAAGIYTLGCVLLDQELQVAKEERETPTTDSMPPLVRQALELKDHQGAEPAFLFGLELIICGLEKQLKCESGS

SEQ ID NO: 285 - protein, 208 aa, Artificial Sequence
  synthetic construct; Sulfonylurea responsive repressor
MGSRLDKSKVINSALELLNEVGIEGLTTRKLAQKLGVEQPTLYWHVKNKRALLDAMAIEMLDRHATHYCPLEGESWQDFLRNNAKSMRCALLSHRDGAKVCLGTGFTEQQYEAAENSLAFLCQQGFSLENALYAMQAVGIYTLGCVLLDQELQVAKEERETPTTDSMPPLARQALELKDHQGAEPAFLFGLELIICGLEKQLKCESGS

SEQ ID NO: 286 - protein, 208 aa, Artificial Sequence
  synthetic construct; Sulfonylurea responsive repressor
MGSRLDKSKVINSALELLNEVGIEGLTTRKLAQKLGVEQPTLYWHVKNKRALLDAMAIEMLDRHATHFCPLEGESWQDFLRNNAKSMRCALLSHRDGAKVCLGTGFTEQQYEAAENSMAFLCQQGFSLEHALYAMQAVGIFTLGCVLLDQELQVAKEERETPTTDSMPPLVRQGLELKDHQGAEPAFLFGLELIICGLEKQLKCESGS

SEQ ID NO: 287 - protein, 208 aa, Artificial Sequence
  synthetic construct; Sulfonylurea responsive repressor
MGSRLDKSKVINSALELLNEVGIEGLTTRKLAQKLGVEQPTLYWHVKNKRALLDALAIEMLDRHATHYCPLEGESWQDFLRNNAKSMRCALLSHRDGAKVCLGTGFTEQMYETAENSMAFLCQQGFSLENAMYAMQAVGIFTLGCVLLDQELQVAKEERETPTTDSMPPLVRQVLELKDHQGAEPAFLFGLELIICGLEKQLKCESGS

SEQ ID NO: 288 - protein, 208 aa, Artificial Sequence
  synthetic construct; Sulfonylurea responsive repressor
MGSRLDKSKVINSALELLNEVGIEGLTTRKLAQKLGVEQPTLYWHVKNKRALLDALAIEMLDRHATHYCPLEGESWQDFLRNNAKSMRCALLSHRDGAKVCLGTGFTEKQYESAENSLAFLCQQGFSLEHALYAMQAVGIYTLGCVLLDQELQVAKEERETPTNDSMPPLVRQVLELKDHQGAEPAFLFGLELIICGLEKQLKCESGS

SEQ ID NO: 289 - protein, 208 aa, Artificial Sequence
  synthetic construct; Sulfonylurea responsive repressor
MGSRLDKSKVINSALELLNEVGIEGLTTRKLAQKLGVEQPTLYWHVKNKRALLDAMAIEMLDRHATHYCPLEGESWQDFLRNNAKSMRCALLSHRDGAKVCLGTGFTEQQYETAENSMAFLCQQGFSLENAMYAMQAACIYTLGCVLLDQELQVAKEERETPTTDSMPPLVRQVLELKDHQGAEPAFLFGLELIICGLEKQLKCESGS

SEQ ID NO: 290 - protein, 208 aa, Artificial Sequence
  synthetic construct; Sulfonylurea responsive repressor
MGSRLDKSKVINSALELLNEVGIEGLTTRKLAQKLGVEQPTLYWHVKNKRALLDALAIEMLDRHATHYCPLEGESWQDFLRNNAKSMRCALLSHRDGAKVCLGTGFTEQMYETAENSMAFLCQQGFSLEHAMYAMQAVGIFTLGCVLLDQELQVAKEERETPTTDSMPPLVRQALELKDHQGAEPAFLFGLELIICGLEKQLKCESGS

SEQ ID NO: 291 - protein, 208 aa, Artificial Sequence
  synthetic construct; Sulfonylurea responsive repressor
MGSRLDKSKVINSALELLNEVGIEGLTTRKLAQKLGVEQPTLYWHVKNKRALLDAMAIEMLDRHATHICPLEEESWQDFLRNNAKSMRCALLSHRDGAKVCLGTGFTEQQYETAENSMAFLCQQGFSLEHAMYAMQAACIYTLGCVLLDQELQVAKEERETPTTDSMPPLVRQVLELKDHQGAEPAFLFGLELIICGLEKQLKCESGS

SEQ ID NO: 292 - protein, 208 aa, Artificial Sequence
  synthetic construct; Sulfonylurea responsive repressor
MGSRLDKSKVINSALELLNEVGIEGLTTRKLAQKLGVEQPTLYWHVKNKRALLDAMAIEMLDRHATHYCPLEGESWQDFLRNNAKSMRCALLSHRDGAKVCLGTGFTEQHYETAENSMAFLCQQGFSLEHAMYAMQAAGIYTLGCVLLDQELQVAKEERETPTTDSMPPLVRQALELKDHQGAEPAFLFGLELIICGLEKQLKCESGS

SEQ ID NO: 293 - protein, 208 aa, Artificial Sequence
  synthetic construct; Sulfonylurea responsive repressor
MGSRLDKSKVINSALELLNEVGIEGLTTRKLAQKLGVEQPTLYWHVKNKRALLDAMAIEMLDRHATHYCPLEGESWQDFLRNNARSMRCALLSHRDGAKVCLGTGFTEQMYETAENSLAFLCQQGFSLENAMYAMQAAGIYTLGCVLLDQELQVAKEERETPTTDSMPPLVRQVLELKDHQGAEPAFLFGLELIICGLEKQLKCESGS

SEQ ID NO: 294 - protein, 208 aa, Artificial Sequence
  synthetic construct; Sulfonylurea responsive repressor
MGSRLDKSKVINSALELLNEVGIEGLTTRKLAQKLGVEQPTLYWHVKNKRALLDAMAIEMLDRHATHYCPLEGESWQDFLRNNAKSMRCALLSHRDGAKVCLGTGFTEQQYESAENSLAFLCQQGFSLENALYAMQAVGIYTLGCVLLDQELQVAKEERETPTTDSMPPLLRQALELKDHQGAEPAFLFGLELIICGLEKQLKCESGS

SEQ ID NO: 295 - protein, 208 aa, Artificial Sequence
  synthetic construct; Sulfonylurea responsive repressor
MGSRLDKSKVINSALELLNEVGIEGLTTRKLAQKLGVEQPTLYWHVKNKRALLDALAIEMLDRHATHYCPLEGESWQDFLRNNAKSMRCALLSHRDGAKVCLGTGFTEKQYESAENSMAFLCQQGFSLEHALYAMQAVGIFTLGCVLLDQELQVAKEERETPTTDSMPPLVRQVLELKDHQGAEPAFLFGLELIICGLEKQLKCESGS

SEQ ID NO: 296 - protein, 208 aa, Artificial Sequence
  synthetic construct; Sulfonylurea responsive repressor
MGSRLDKSKVINSALELLNEVGIEGLTTRKLAQKLGVEQPTLYWHVKNKRALLDAMAIEMLDRHATHYCPLEGESWQDFLRNNAKSMRCALLSHRDGAKVCLGTGFTEQQYESAENSMAFLCQQGFSLEHALYAMQAAGIYTLGCVLLNQELQVAKEERETPTTDSMPPLVRQGLELKDHQGAEPAFLFGLELIICGLEKQLKCESGS

SEQ ID NO: 297 - protein, 208 aa, Artificial Sequence
  synthetic construct; Sulfonylurea responsive repressor
MGSRLDKSKVINSALELLNEVGIEGLTTRKLAQKLGVEQPTLYWHVKNKRALLDAMAIEMLDSHATHYCPLEGESWQDFLRNNAKSMRCALLSHRDGAKVCLGTGFTEQQYETAENSMAFLCQQGFSLEHAMYAMQAAGIFTLGCVLLDQELQVAKEERETPTTDSMPPLVRQGLELKDHQGAEPAFLFGLELIICGLEKQLKCESGS

SEQ ID NO: 298 - protein, 208 aa, Artificial Sequence
  synthetic construct; Sulfonylurea responsive repressor
MGSRLDKSKVINSALELLNEVGIEGLTTRKLAQKLGVEQPTLYWHVKNKRALLDAMAIEMLDRHATHYCPLEGESWPDFLRNNAKSMRCALLSHRDGAKVCLGTGFTEQQYETAENSLAFLCQQGFSLEHALYAMQAVGIYTLGCVLLDQELQVAKEERETPTTDSMPPLLRQGLELKDHQGAEPAFLFGLELIICGLEKQLKCESGS

SEQ ID NO: 299 - protein, 208 aa, Artificial Sequence
  synthetic construct; Sulfonylurea responsive repressor
MGSRLDKSKVINSALELLNEVGIEGLTTRKLAQKLGVEQPTLYWHVKNKRALLDAMAIEMLDRHATHYCPLEGESWQDFLRNNAKSMRCALLSHRDGAKVCLGTGFTEQQYESAENSLAFLCQQGFSLENALYAMQAVGIFTLGCVLLDQELQVAKEERETPTTDSMPPLVRQALELKDHQGAEPAFLFGLELIICGLEKQLKCESGS

SEQ ID NO: 300 - protein, 208 aa, Artificial Sequence
  synthetic construct; Sulfonylurea responsive repressor
MGSRLDKSKVINSALELLNEVGIEGLTTRKLAQKLGVEQPTLYWHVKNKRALLDALAIEMLDRHATHYCPLEGESWQDFLRNNAKSMRCALLSHRDGAKVCLGTGFTEKQYETAENSLAFLCQQGFSLEHALYAMQAVGIYTLGCVLLDQELQVAKEERETPTTDSMPPLVRQGLELKDHQGAEPAFLFGLELIICGLEKQLKCESGS

SEQ ID NO: 301 - protein, 208 aa, Artificial Sequence
  synthetic construct; Sulfonylurea responsive repressor
MGSRLDKSKVINSALELLNEVGIEGLTTRKLAQKLGVEQPTLYWHVKNKRALLDAMAIEMLDRHATHYCPLEGESWQDFLRNNAKSMRCALLSHRDGAKVCLGTGFTEQQYETAENSMAFLCQQGFSLEHALYAMQAVGIYTLGCVLLDQELQVAKEERETPTTDSMPPLVRQGLELKDHQGAEPAFLFGLELIICGLEKQLKCESGS

SEQ ID NO: 302 - protein, 208 aa, Artificial Sequence
  synthetic construct; Sulfonylurea responsive repressor
  MISC_FEATURE (110)..(110): Xaa = any amino acid
  MISC_FEATURE (141)..(141): Xaa = any amino acid
  MISC_FEATURE (174)..(174): Xaa = any amino acid
MGSRLDKSKVINSALELLNEVGIEGLTTRKLAQKLGVEQPTLYWHVKNKRALLDAMAIEMLDRHATHYCPLEGESWQDFLRNNAKSMRCALLSHRDGAKVCLGTGFTEQXYEAAENSLAFLCQQGFSLEHALYAMQAVGIXTLGCVLLDQELQVAKEERETPTTDSMPPLVRQXLELKDHQGAEPAFLFGLELIICGLEKQLKCESGS

SEQ ID NO: 303 - protein, 208 aa, Artificial Sequence
  synthetic construct; Sulfonylurea responsive repressor
MGSRLDKSKVINSALELLNEVGIEGLTTRKLAQKLGVEQPTLYWHVKNKRALLDALAIEMLDRHATHYCPLEGESWQDFLRNNAKSMRCALLSHRDGAKVCLGTGFTEQHYETAENSMAFLCQQGFSLEHAMYAMQAAGIFTLGCVLLDQELQVAKEERETPTTDSMPPLVRQGLELKDHQGAEPAFLFGLELIICGLEKQLKCESGS

SEQ ID NO: 304 - protein, 208 aa, Artificial Sequence
  synthetic construct; Sulfonylurea responsive repressor
MGSRLDKSKVINSALELLNEVGIEGLTTRKLAQKLGVEQPTLYWHVKNKRALLDAMAIEMLDRHATHYCPLEGESWQDFLRNNAKSMRCALLSHRDGAKVCLGTGFTEQQYETAENSLAFLCQQGFSLEHAMYAMQAVGIFTLGCVLLDQELQVAKEERETPTTDSMPPLVRQGLELKDHQGAEPAFLFGLELIICGLEKQLKCESGS

SEQ ID NO: 305 - protein, 208 aa, Artificial Sequence
  synthetic construct; Sulfonylurea responsive repressor
MGSRLDKSKVINSALELLNEVGIEGLTTRKLAQKLGVEQPTLYWHVKNKRALLDALAIEMLDRHATHYCPLEGESWQDFLRNNAKSMRCALLSHRDGAKVCLGTGFTEKQYETAENSLAFLCQQGFSLENALYAMQAAGIYTLGCVLLDQELQVAKEERETPTTDSMPPLVRQVLELKDHQGAEPAFLFGLELIICGLEKQLKCESGS

SEQ ID NO: 306 - protein, 208 aa, Artificial Sequence
  synthetic construct; Sulfonylurea responsive repressor
MGSRLDKSKVINSALELLNEVGIEGLTTRKLAQKLGVEQPTLYWHVKNKRALLDALAIEMLDRHATHYCPLEGESWQDFLRNNAKSMRCALLSHRDGAKVCLGTGFTEQQYEAAENSMAFLCQQGFSLEHAMYAMQAAGIYTLGCVLLDQELQVAKEERETPTTDSMPPLLRQALELKDHQGAEPAFLFGLELIICGLEKQLKCESGS

SEQ ID NO: 307 - protein, 208 aa, Artificial Sequence; identical to SEQ ID NO: 296
  synthetic construct; Sulfonylurea responsive repressor

SEQ ID NO: 308 - protein, 208 aa, Artificial Sequence
  synthetic construct; Sulfonylurea responsive repressor
  MISC_FEATURE (68)..(68): Xaa = any amino acid
  MISC_FEATURE (113)..(113): Xaa = any amino acid
  MISC_FEATURE (130)..(130): Xaa = any amino acid
  MISC_FEATURE (171)..(171): Xaa = any amino acid
MGSRLDKSKVINSALELLNEVGIEGLTTRKLAQKLGVEQPTLYWHVKNKRALLDAMAIEMLDRHATHXCPLEGESWQDFLRNNAKSMRCALLSHRDGAKVCLGTGFTEQMYEXAENSMAFLCQQGFSLEXAMYAMQAVGIFTLGCVLLDQELQVAKEERETPTTDSMPPLXRQVLELKDHQGAEPAFLFGLELIICGLEKQLKCESGS

SEQ ID NO: 309 - protein, 208 aa, Artificial Sequence
  synthetic construct; Sulfonylurea responsive repressor
MGSRLDKSKVINSALELLNEVGIEGLTTRKLAQKLGVEQPTLYWHVKNKRALLDAMAIEMLDRHATHYCPLEGESWQDFLRNNAKSMRCALLSHRDGAKVCLGTGFTEQQYETAENSLAFLCQQGFSLEHALYAMQAVGIYTLGCVLLDQELQVAKEERETPTTDSMPPLVRQALELKDHQGAEPAFLFGLELIICGLEKQLKCESGS

SEQ ID NO: 310 - protein, 208 aa, Artificial Sequence
  synthetic construct; Sulfonylurea responsive repressor
MGSRLDKSKVINSALELLNEVGIEGLTTRKLAQKLGVEQPTLYWHVKNKRALLDAMAIEMLDRHATHYCPLEGESWQDFLRNNAKSMRCALLSHRDGAKVCLGTGFTEQQYETAENSMAFLCQQGFSLEHAMYAMQAACIFTLGCVLLDQELQVAKEERETPTTDSMPPLVRQVLELKDHQGAEPAFLFGLELIICGLEKQLKCESGS

SEQ ID NO: 311 - protein, 208 aa, Artificial Sequence
  synthetic construct; Sulfonylurea responsive repressor
MGSRLDKSKVINSALELLNEVGIEGLTTRKLAQKLGVEQPTLYWHVKNKRALLDALAIEMLDRHATHYCPLEGESWQDFLRNNAKSMRCALLSHRDGAKVCLGTGFTEQMYETAENSLAFLCQQGFSLEHALYAMQAVGIFTLGCVLLDQELQVAKEERETPTTDSMPPLVRQGLELKDHQGAEPAFLFGLELIICGLEKQLKCESGS

SEQ ID NO: 312 - protein, 208 aa, Artificial Sequence
  synthetic construct; Sulfonylurea responsive repressor
MGSRLDKSKVINSALELLNEVGIEGLTTRKLAQKLGVEQPTLYWHVKNKRALLDAMAIEMLDRHATHMCPLEGESWQDFLRNNAKSMRCALLSHRDGAKVCLGTGFTEQMYESAENSMAFLCQQGFSLENAMYAMQAVGIFTLGCVLLDQELQVAKEERETPTTDSMPPLARQVLELKDHQGAEPAFLFGLELIICGLEKQLKCESGS

SEQ ID NO: 313 - protein, 208 aa, Artificial Sequence
  synthetic construct; Sulfonylurea responsive repressor
MGSRLDKSKVINSALELLNEVGIEGLTTRKLAQKLGVEQPTLYWHVKNKRALLDAMAIEMLDRHATHMCPLEGESWQDFLRNNAKSMRCALLSHRDGAKVCLGTGFTEQMYETAENSMAFLCQQGFSLENAMYAMQAAGIYTLGCVLLDQELQVAKEERETPTTDSMPPLVRQVLELKDHQGAEPAFLFGLELIICGLEKQLKCESGS

SEQ ID NO: 314 - protein, 208 aa, Artificial Sequence
  synthetic construct; Sulfonylurea responsive repressor
MGSRLDKSKVINSALELLNEVGIEGLTTRKLAQKLGVEQPTLYWHVKNKRALLDALAIEMLDRHATHYCPLEGESWQDFLRNNAKSMRCALLSHRDGAKVCLGTGFTEQMYESAENSLAFLCQQGFSLENAMYAMQAAGIFTLGCVLLDQELQVAKEERETPTTDSMPPLVRQVLELKDHQGAEPAFLFGLELIICGLEKQLKCESGS

SEQ ID NO: 315 - protein, 208 aa, Artificial Sequence
  synthetic construct; Sulfonylurea responsive repressor
MGSRLDKSKVINSALELLNEVGIEGLTTRKLAQKLGVEQPTLYWHVKNKRALLDAMAIEMLDRHATHFCPLEGESWQDFLRNNAKSMRCALLSHRDGAKVCLGTGFTEQQYEGAENSMAFLCQQGFSLENAMYAMQAAGIFTLGCVLLDQELQVAKEERETPTTDSMPPLVRQVLELKDHQGAEPAFLFGLELIICGLEKQLKCESGS

SEQ ID NO: 316 - protein, 208 aa, Artificial Sequence
  synthetic construct; Sulfonylurea responsive repressor
  misc_feature (6)..(6): Xaa can be any naturally occurring amino acid
  MISC_FEATURE (82)..(82): Xaa = any amino acid
  MISC_FEATURE (110)..(110): Xaa = any amino acid
  MISC_FEATURE (130)..(130): Xaa = any amino acid
  MISC_FEATURE (174)..(174): Xaa = any amino acid
MGSRLXKSKVINSALELLNEVGIEGLTTRKLAQKLGVEQPTLYWHVKNKRALLDALAIEMLDRHATHYCPLEGESWQDFLRXNAKSMRCALLSHRDGAKVCLGTGFTEQXYETAENSLAFLCQQGFSLEXALYAMQAVGIYTLGCVLLDQELQVAKEERETPTTDSMPPLLRQXLELKDHQGAEPAFLFGLELIICGLEKQLKCESGS

SEQ ID NO: 317 - protein, 208 aa, Artificial Sequence
  synthetic construct; Sulfonylurea responsive repressor
MGSRLDKSKVINSALELLNEVGIEGLTTRKLAQKLGVEQPTLYWHVKNKRALLDAMAIEMLDRHATHYCPLEGESWQDFLRNNAKSMRCALLSHRDGAKVCLGTGFTEQQYETAENSMAFLCQQGFSLEHALYAMQAAGIYTLGCVLLDQELQVAKEERETPTTDSMPPLLRQGLELKDHQGAEPAFLFGLELIICGLEKQLKCESGS

SEQ ID NO: 318 - protein, 208 aa, Artificial Sequence
  synthetic construct; Sulfonylurea responsive repressor
MGSRLDKSKVINSALELLNEVGIEGLTTRKLAQKLGVEQPTLYWHVKNKRALLDAMAIEMLDRHATHYCPLEGESWQDFLRNNAKSMRCALLSHRDGAKVCLGTGFTEQQYETAENSMAFLCQQGFSLENAMYAMQAAGIFTLGCVLLDQELQVAKEERETPTTDSMPPLVRQVLELKDHQGAEPAFLFGLELIICGLEKQLKCESGS

SEQ ID NO: 319 - protein, 208 aa, Artificial Sequence
  synthetic construct; Sulfonylurea responsive repressor
MGSRLDKSKVINSALELLNEVGIEGLTTRKLAQKLGVEQPTLYWHVKNKRALLDAMAIEMLDRHATHYCPLEGESWQDFLRNNARSMRCALLSHRDGAKVCLGTGFTEQMYETAENSLAFLCQQGFSLENALYAMQAAGIYTLGCVLLDQELQVAKEERETPTTDSMPPLVRQVLELKDHQGAEPAFLFGLELIICGLEKQLKCESGS

SEQ ID NO: 320 - protein, 208 aa, Artificial Sequence
  synthetic construct; Sulfonylurea responsive repressor
MGSRLDKSKVINSALELLNEVGIEGLTTRKLAQKLGVEQPTLYWHVKNKRALLDALAIEMLDRHATHYCPLEGESWQDFLRNNAKSMRCALLSHRDGAKVCLGTGFTEQMYETAENSLAFLCQQGFSLENALYAMQAAGIFTLGCVLLDQELQVAKEERETPTTDSMPPLVRQALELKDHQGAEPAFLFGLELIICGLEKQLKCESGS

SEQ ID NO: 321 - protein, 208 aa, Artificial Sequence
  synthetic construct; Sulfonylurea responsive repressor
MGSRLDKSKVINSALELLNEVGIEGLTTRKLAQKLGVEQPTLYWHVKNKRALLDAMAIEMLDRHATHYCPLEGESWQDFLRNNAKSMRCALLSHRDGAKVCLGTGFTEQQYESAENSMAFLCQQGFSLEHAMYAMQAAGIYTLGCVLLDQELQVAKEERETPTTDSMPPLLRQVLELNDHQGAEPAFLFGLELIICGLEKQLKCESGS

SEQ ID NO: 322 - protein, 208 aa, Artificial Sequence; identical to SEQ ID NO: 321
  synthetic construct; Sulfonylurea responsive repressor

SEQ ID NO: 323 - protein, 208 aa, Artificial Sequence
  synthetic construct; Sulfonylurea responsive repressor
MGSRLDKSKVINSALELLNEVGIEGLTTRKLAQKLGVEQPTLYWHVKNKRALLDAMAFEMLDRHATHYCPLEGESWQDFLRNNAKSMRCALLSHRDGAKVCLGTGFTEQQYETAENSMAFLCQQGFSLENALYAMQAVCIYTLGCVLLDQELQVAKEERETPTTDSMPPLLRQALEIKDHQGAEPAFLFGLELIICGLEKQLKCESGS

SEQ ID NO: 324 - protein, 208 aa, Artificial Sequence
  synthetic construct; Sulfonylurea responsive repressor
MGSRLDKSKVINSALELLNEVGIEGLTTRKLAQKLGVEQPTLYWHVKNKRALLDAMAIEMLDRHATHYCPLEGESWQDFLRNNAKSMRCALLSHRDGAKVCLGTGFTEQQYETAENSLAFLCQQGFSLEHALYAMQAVGIYTLGCVLLDQELQVAKEERETPTTDSMPPLVRQGLELKDHQGAEPAFLFGLELIICGLEKQLKCESGS

SEQ ID NO: 325 - protein, 208 aa, Artificial Sequence
  synthetic construct; Sulfonylurea responsive repressor
MGSRLDKSKVINSALELLNEVGIEGLTTRKLAQKLGVEQPTLYWHVKNKRALLDALAIEMLDRHATHVCPLEGESWQDFLRNTAKSMRCALLSHRDGAKVCLGTGFTEQQYEAAENSMAFLCQQGFSLEHALYAMQAAGIFTLGCVLLDQELQVAKEERETPTTDSMPPLVRQVLELKDHQGAEPAFLFGLELIICGLEKQLKCESGS

SEQ ID NO: 326 - protein, 208 aa, Artificial Sequence
  synthetic construct; Sulfonylurea responsive repressor
MGSRLDKSKVINSALELLNEVGIEGLTTRKLAQKLGVEQPTLYWHVKNKRALLDAMAIEMLDRHATHICPLEGESWQDFLRNNAKSMRCALLSHRDGAKVCLGTGFTEQQYEAAENSLAFLCQQGFSLEHALYAMQAVGIYTLGCVLLDQELQVAKEERETPTTDSMPPLVRQALELKDHQGAEPAFLFGLELIICGLEKQLKCESGS

SEQ ID NO: 327 - protein, 208 aa, Artificial Sequence
  synthetic construct; Sulfonylurea responsive repressor
MGSRLDKSKVINSALELLNEVGIEGLTTRKLAQKLGVEQPTLYWHVKNKRALLDALAIEMLDRHATHYCPLEGESWQDFLRNNAKSMRCALLSHRDGAKVCLGTGFTEKQYETAENSLAFLCQQGFSLENALYAMQAVGIFTLGCVLLDQELQVAKEERETPTTDSMPPLVRQALELKDHQGAEPAFLFGLELIICGLEKQLKCESGS

SEQ ID NO: 328 - protein, 208 aa, Artificial Sequence
  synthetic construct; Sulfonylurea responsive repressor
MGSRLDKSKVINSALELLNEVGIEGLTTRKLAQKLGVEQPTLYWHVKNKRALLDAMAIEMLDRHATHLCPLEGESWQDFLRNNAKSMRSALLIHRDGAKVCLGTGFTEQQYEAAENSMAFLCQQGFSLENAMYAMQAVGIYTLGCVLLDQELQVAKEERETPTTDRMPPLARQALELKDHQGAEPAFLFGLELIICGLEKQLKCESGS

SEQ ID NO: 329 - protein, 208 aa, Artificial Sequence
  synthetic construct; Sulfonylurea responsive repressor
MGSRLDKSKVINSALELLNEVGIEGLTTRKLAQKLGVEQPTLYWHVKNKRALLDAMAIEMLDRHATHYCPLEGESWQDFLRNNAKSMRCALLSHRDGAKVCLGTGFTEQQYEAAENSLAFLCQQGFSLENAMYAMQAAGIYTLGCVLLDQELQVAKEERETPTTDSMPPLVRQGLELKDHQGAEPAFLFGLELIICGLEKQLKCESGS

SEQ ID NO: 330 - protein, 208 aa, Artificial Sequence
  synthetic construct; Sulfonylurea responsive repressor
MGSRLDKSKVINSALELLNEVGIEGLTTRKLAQKLGVEQPTLYWHVKNKRALLDAMAIEMLDRHATHYCPLEGESWQDFLRNNAKSMRCALLSHRDGAKVCLGTGFTEQQYEAAENSMAFLCQQGFSLENAMYSMQAVGIFTLGCVLLDQELQVAKEERETPTTDSMPPLVRQGLELKDHQGAEPAFLFGLELIICGLEKQLKCESGS

SEQ ID NO: 331 - protein, 208 aa, Artificial Sequence
  synthetic construct; Sulfonylurea responsive repressor
MGSRLDKSKVINSALELLNEVGIEGLTTRKLAQKLGVEQPTLYWHVKNKRALLDALAIEMLDRHATHYCPLEGESWQDFLRNNAKSMRCALLSHRDGAKVCLGTGFTEKQYESAENSLAFLCQQGFSLEHALYAMQAVGIYTLGCVLLDQELQVAKEERETPTTDSMPPLVRQALELKDHQGAEPAFLFGLELIICGFEKQLKCESGS

SEQ ID NO: 332 - protein, 208 aa, Artificial Sequence
  synthetic construct; Sulfonylurea responsive repressor
  MISC_FEATURE (110)..(110): Xaa = any amino acid
  MISC_FEATURE (171)..(171): Xaa = any amino acid
MGSRLDKSKVINSALELLNEVGIEGLTTRKLAQKLGVEQPTLYWHVKNKRALLDAMAIEMLDRHATHYCPLEGESWQDFLRNNAKSMRCALLSHRDGAKVCLGTGFTEQXYETAENSMAFLCQQGFSLENALYAMQAAGIYTLGCVLLDQELQVAKEERETPTTDSMPPLXRQALELKDHQGAEPAFLFGLELIICGLEKQLKCESGS

SEQ ID NO: 333 - protein, 208 aa, Artificial Sequence
  synthetic construct; Sulfonylurea responsive repressor
MGSRLDKSKVINSALELLNEVGIEGLTTRKLAQKLGVEQPTLYWHVKNKRALLDAMAIEMLDRHATHYCPLEGESWQDFLRNNAKSMRCALLSHRDGAKVCLGTGFTEQQYETAENSMAFLCQQGFSLENAMYAMQAAGIFTLGCVLLDQELRVAKEERETPTTDSMPPLLRQVLELKDHQGAEPAFLFGLELIICGLEKQLKCESGS

SEQ ID NO: 334 - protein, 208 aa, Artificial Sequence
  synthetic construct; Sulfonylurea responsive repressor
MGSRLDKSKVINSALELLNEVGIEGLTTRKLAQKLGVEQPTLYWHVKNKRALLDAMAIEMLDRHATHYCPLEGESWQDFLRNNAKSMRCALLSHRDGAKVCLGTGFTEQQYETAENSLAFLCQQGFSLENAMYAMQAVGIFTLGCVLLDQELQVAKEERETPTTDSMPPLLRQVLELKDHQGAEPAFLFGLELIICGLEKQLKCESGS

SEQ ID NO: 335 - protein, 208 aa, Artificial Sequence
  synthetic construct; Sulfonylurea responsive repressor
MGSRLDKSKVINSALELLNEVGIEGLTTRKLAQKLGVEQPTLYWHVKNKRALLDAMAIEMLDRHATHYCPLEGESWQDFLRNNAKSMRCALLSHRDGAKVCLGTGFTEQQYEGAENSMAFLCQQGFSLENALYAMQAVGIYTLGCVLLDQELQVAKEERETPTTDSMPSLVRQVLELKDHQGAEPAFLFGLELIICGLEKQLKCESGS

SEQ ID NO: 336 - protein, 208 aa, Artificial Sequence
  synthetic construct; Sulfonylurea responsive repressor
  MISC_FEATURE (56)..(56): Xaa = any amino acid
  MISC_FEATURE (113)..(113): Xaa = any amino acid
MGSRLDKSKVINSALELLNEVGIEGLTTRKLAQKLGVEQPTLYWHVKNKRALLDAXAIEMLDRHATHYCPLEGESWQDFLRNNAKSMRCALLSHRDGAKVCLGTGFTEQQYEXAENSLAFLCQQGFSLEHALYAMQAAGIYTLGCVLLDQELQVAKEERETPTTDSMPPLLRQALELKDHQGAEPAFLFGLELIICGLEKQLKCESGS

SEQ ID NO: 337 - protein, 208 aa, Artificial Sequence
  synthetic construct; Sulfonylurea responsive repressor
MGSRLDKSKVINSALELLNEVGIEGLTTRKLAQKLGVEQPTLYWHVKNKRALLDALAIEMLDRHATHYCPLEGESWQDFLRNNAKSMRCALLSHRDGAKVCLGTGFTEQMYETAENSMAFLCQQGFSLENAMYAMQAAGIYTLGCVLLDQELQVAKEERETPTTDSMPPLVRQGLELKDHQGAEPAFLFGLELIICGLEKQLKCESGS

SEQ ID NO: 338 - protein, 208 aa, Artificial Sequence; identical to SEQ ID NO: 235
  synthetic construct; Sulfonylurea responsive repressor

SEQ ID NO: 339 - protein, 208 aa, Artificial Sequence
  synthetic construct; Sulfonylurea responsive repressor
MGSRLDKSKVINSALELLNEVGIEGLTTRKLAQKLGVEQPTLYWHVKNKRALLDALAIEMLDRHATHYCPLEGESWQDFLRNNAKSMRCALLSHRDGAKVCLGTGFTEKQYETAENSMAFLCQQGFSLEHAMYAMQAAGIYTLGCVLLDQELQVAKEERETPTTDSMPPLVRQALELKDHQGAEPAFLFGLELIICGLEKQLKCESGS

SEQ ID NO: 340 - protein, 208 aa, Artificial Sequence
  synthetic construct; Sulfonylurea responsive repressor
MGSRLDKSKVINSALELLNEVGIEGLTTRKLAQKLGVEQPTLYWHVKNKRALLDAMAIEMLDRHATHLCPLEGESWQDFLRNNAKSMRCALLSHRDGAKVCLGTGFTEQMYETAENSLAFLCQQGFSLENALYAMQAAGIYTLGCVLLDQELQVAKEERETPTTDSMPPLVRQVLELKDHQGAEPAFLFGLELIICGLEKQLKCESGS

SEQ ID NO: 341 - protein, 208 aa, Artificial Sequence
  synthetic construct; Sulfonylurea responsive repressor
  MISC_FEATURE (109)..(109): Xaa = any amino acid
MGSRLDKSKVINSALELLNEVGIEGLTTRKLAQKLGVEQPTLYWHVKNKRALLDALAIEMLDRHATHYCPLEGESWQDFLRNNAKSMRCALLSHRDGAKVCLGTGFTEXQYEAAENSLAFLCQQGFSLEHALYAMQAVGIYTLGCVLLDQELQVAKEERETPTTDSMPPLVRQALELKDHQGAEPAFLFGLELIICGLEKQLKCESGS

SEQ ID NO: 342 - protein, 208 aa, Artificial Sequence
  synthetic construct; Sulfonylurea responsive repressor
MGSRLDKSKVINSALELLNEVGIEGLTTRKLAQKLGVEQPTLYWHVKNKRALLDAMAIEMLDRHATHYCPLEGESWQDFLRNNAKSMRCALLSHRDGAKVCLGTGFTEQQYESAENSLAFLCQQGFSLEHAMYAMQAAGIFTLGCVLLDQELQVAKEERETPTTDSMPPLVRQALELKDHQGAEPAFLFGLELIICGLEKQLKCESGS

SEQ ID NO: 343 - protein, 208 aa, Artificial Sequence; identical to SEQ ID NO: 274
  synthetic construct; Sulfonylurea responsive repressor

SEQ ID NO: 344 - protein, 208 aa, Artificial Sequence
  synthetic construct; Sulfonylurea responsive repressor
MGSRLDKSKVINSALELLNEVGIEGLTTRKLAQKLGVEQPTLYWHVKNKRALLDALAIEMLDRHATHYCPLEGESWQDFLRNNAKSMRCALLSHRDGAKVCLGTGFTEQMYEAAENSLAFLCQQGFSLEHAMYAMQAVGIYTLGCVLLDQELQVAKEERETPTTDSMPPLVRQGLELKDHQGAEPAFLFGLELIICGLEKQLKCESGS

SEQ ID NO: 345 - protein, 208 aa, Artificial Sequence
  synthetic construct; Sulfonylurea responsive repressor
  misc_feature (56)..(56): Xaa can be any naturally occurring amino acid
  MISC_FEATURE (68)..(68): Xaa = any amino acid
  MISC_FEATURE (110)..(110): Xaa = any amino acid
  MISC_FEATURE (130)..(130): Xaa = any amino acid
  MISC_FEATURE (139)..(139): Xaa = any amino acid
  MISC_FEATURE (141)..(141): Xaa = any amino acid
MGSRLDKSKVINSALELLNEVGIEGLTTRKLAQKLGVEQPTLYWHVKNKRALLDAXAIEMLDRHATHXCPLEGESWQDFLRNNAKSMRCALLSHRDGAKVCLGTGFTEQXYETAENSLAFLCQQGFSLEXAMYAMQAAXIXTLGCVLLDQELQVAKEERETPTTDSMPPLVRQALELKDHQGAEPAFLFGLELIICGLEKQLKCESGS

SEQ ID NO: 346 - protein, 208 aa, Artificial Sequence
  synthetic construct; Sulfonylurea responsive repressor
  MISC_FEATURE (171)..(171): Xaa = any amino acid
MGSRLDKSKVINSALELLNEVGIEGLTTRKLAQKLGVEQPTLYWHVKNKRALLDAMAIEMLDRHATHYCPLEGESWQDFLRNNAKSMRCALLSHRDGAKVCLGTGFTEQQYESAENSLAFLCQQGFSLENAMYAMQAAGIYTLGCVLLDQELQVAKEERETPTTDSMPPLXRQALELKDHQGAEPAFLFGLELIICGLEKQLKCESGS

SEQ ID NO: 347 - protein, 208 aa, Artificial Sequence
  synthetic construct; Sulfonylurea responsive repressor
MGSRLDKSKVINSALELLNEVGIEGLTTRKLAQKLGVEQPTLYWHVKNKRALLDAMAIEMLDRHATHICPLEGESWQDFLRNNAKSMRCALLSHRDGAKVCLGTGFTEQQYETAENSLAFLCQQGFSLEHAMYAMQAAGIYTLGCVLLDQELQVAKEERETPTTDSMPPLVRQVLELKDHQGAEPAFLFGLELIICGLEKQLKCESGS

SEQ ID NO: 348 - protein, 208 aa, Artificial Sequence
  synthetic construct; Sulfonylurea responsive repressor
  MISC_FEATURE (130)..(130): Xaa = any amino acid
MGSRLDKSKVINSALELLNEVGIEGLTTRKLAQKLGVEQPTLYWHVKNKRALLDAMAIEMLDRHATHMCPLEGESWQDFLRNNAKSMRCALLSHRDGAKVCLGTGFTEQQYESAENSMAFLCQQGFSLEXAMYAMQAVGIFTLGCVLLDQELQVAKEERETPTTDSMPPLVRQGLELKDHQGAEPAFLFGLELIICGLEKQLKCESGS

SEQ ID NO: 349 - protein, 208 aa, Artificial Sequence
  synthetic construct; Sulfonylurea responsive repressor
MGSRLDKSKVINSALELLNEVGIEGLTTRKLAQKLGVEQPTLYWHVKNKRALLDALAIEMLDRHATHYCPLEGESWQDFLRNNAKSMRCALLSHRDGAKVCLGTGFTEKQYESAENSMAFLCQQGFSLEHALYAMQAVGIYTLGCVLLDQELQVAKEERETPTTDSMPPLVRQGLELKDHQGAEPAFLFGLELIICGLEKQLKCESGS

SEQ ID NO: 350 - protein, 208 aa, Artificial Sequence
  synthetic construct; Sulfonylurea responsive repressor
MGSRLDKSKVINSALELLNEVGIEGLTTRKLAQKLGVEQPTLYWHVKNKRALLDAMAIEMLDRHATHYCPLEGESWQDFLRNNAKSMRCALLSHRDGAKVCLGTGFTEQQYEGAENSLAFLCQQGFSLEHAMYAMQAVGIFTLGCVLLDQELQVAKEERETPTTDSMPPLVRQGLELKDHQGAEPAFLFGLELIICGLEKQLKCESGS

SEQ ID NO: 351 - protein, 208 aa, Artificial Sequence
  synthetic construct; Sulfonylurea responsive repressor
MGSRLDKSKVINSALELLNEVGIEGLTTRKLAQKLGVEQPTLYWHVKNKRALLDAMAIEMLDRHATHYCPLEGESWQDFLRNNAKSMRCALLSHRDGAKVCLGTGFTEQQYESAENSLAFLCQQGFSLENAMYAMQAVGIFTLGCVLLDQELQVAKEERETPTTDSMPPLLRQVLELKDHQGAEPAFLFGLELIICGLEKQLKCESGS

SEQ ID NO: 352 - protein, 208 aa, Artificial Sequence
  synthetic construct; Sulfonylurea responsive repressor
MGSRLDKSKVINSALELLNEVGIEGLTTRKLAQKLGVEQPTLYWHVKNKRALLDAMAIEMLDRHATHICPLEGESWQDFLRNNAKSMRCALLSHRDGAKVCLGTGFTEQQYETAENSLAFLCQQGFSLENAMYAMQAVGIYTLGCVLLDQELQVAKEERETPTTDSMPPLVRQALELKDHQGAEPAFLFGLELIICGLEKQLKCESGS

SEQ ID NO: 353 - protein, 208 aa, Artificial Sequence
  synthetic construct; Sulfonylurea responsive repressor
MGSRLDKSKVINSALELLNEVGIEGLTTRKLAQKLGVEQPTLYWHVKNKRALLDAMAIEMLDRHATHYCPLEGESWQDFLRNNAKSMRCALLSQRDGAKVCLGTGFTEQQYEAAENSLAFLCQQGFSLENAMYAMQAVGIFTLGCVLLDQELQVAKEERETPTTDSMPPLVRQALELKDHQGAEPAFLFGLELIICGLEKQLKCESGS

SEQ ID NO: 354 - protein, 208 aa, Artificial Sequence
  synthetic construct; Sulfonylurea responsive repressor
MGSRLDKSKVINSALELLNEVGIEGLTTRKLAQKLGVEQPTLYWHVKNKRALLDAMAIEMLDRHATHYCPLEGESWQDFLRNNAKSMRCALLSHRDGAKVCLGTGFTEQQYEGAENSMAFLCQQGFSLENALYAMQAVGIYTLGCVLLDQELQVAKEERETPTTDSMPPLVRQVLELKDHQGAEPAFLFGLELIICGLEKQLKCESGS

SEQ ID NO: 355 - protein, 208 aa, Artificial Sequence
  synthetic construct; Sulfonylurea responsive repressor
MGSRLDKSKVINSALELLNEVGIEGLTTRKLAQKLGVEQPTLYWHVKNKRALLDAMAIEMLDRHATHYCPLEGESWQDFLRNNAKSMRCALLSHRDGAKVCLGTGFTEQQYEGAENSMAFLCQQGFSLENAMYAMQAAGIYTLGCVLLDQELQVAKEERETPTTDSMPPLVRQALELKDHQGAEPAFLFGLELIICGLEKQLKCESGS

SEQ ID NO: 356 - protein, 208 aa, Artificial Sequence
  synthetic construct; Sulfonylurea responsive repressor
  MISC_FEATURE (56)..(56): Xaa = any amino acid
  MISC_FEATURE (110)..(110): Xaa = any amino acid
  MISC_FEATURE (132)..(132): Xaa = any amino acid
  MISC_FEATURE (138)..(138): Xaa = any amino acid
MGSRLDKSKVINSALELLNEVGIEGLTTRKLAQKLGVEQPTLYWHVKNKRALLDAXAIEMLDRHATHYCPLEGESWQDFLRNNAKSMRCALLSHRDGAKVCLGTGFTEQXYEAAENSMAFLCQQGFSLEHAXYAMQAXGIYTLGCVLLDQELQVAKEERETPTTDSMPPLVRQVLELKDHQGAEPAFLFGLELIICGLEKQLKCESGS

SEQ ID NO: 357 - protein, 208 aa, Artificial Sequence
  synthetic construct; Sulfonylurea responsive repressor
  misc_feature (53)..(53): Xaa can be any naturally occurring amino acid
  MISC_FEATURE (56)..(56): Xaa = any amino acid
  MISC_FEATURE (63)..(63): Xaa = any amino acid
  MISC_FEATURE (80)..(80): Xaa = any amino acid
  MISC_FEATURE (86)..(86): Xaa = any amino acid
  MISC_FEATURE (89)..(89): Xaa = any amino acid
  MISC_FEATURE (99)..(99): Xaa = any amino acid
  MISC_FEATURE (102)..(102): Xaa = any amino acid
  MISC_FEATURE (106)..(106): Xaa = any amino acid
  MISC_FEATURE (110)..(110): Xaa = any amino acid
  MISC_FEATURE (121)..(121): Xaa = any amino acid
  MISC_FEATURE (130)..(130): Xaa = any amino acid
  MISC_FEATURE (132)..(132): Xaa = any amino acid
  MISC_FEATURE (140)..(140): Xaa = any amino acid
  MISC_FEATURE (141)..(141): Xaa = any amino acid
  MISC_FEATURE (148)..(148): Xaa = any amino acid
  MISC_FEATURE (171)..(171): Xaa = any amino acid
  misc_feature (174)..(174): Xaa can be any naturally occurring amino acid
  MISC_FEATURE (198)..(198): Xaa = any amino acid
MGSRLDKSKVINSALELLNEVGIEGLTTRKLAQKLGVEQPTLYWHVKNKRALXDAXAIEMLDXHATHYCPLEGESWQDFXRNNAKXMRXALLSHRDGAXVCXGTGXTEQXYETAENSLAFXCQQGFSLEXAXYAMQAVGXXTLGCVLXDQELQVAKEERETPTTDSMPPLXRQXLELKDHQGAEPAFLFGLELIICGXEKQLKCESGS

SEQ ID NO: 358 - protein, 208 aa, Artificial Sequence; identical to SEQ ID NO: 344
  synthetic construct; Sulfonylurea responsive repressor

SEQ ID NO: 359 - protein, 208 aa, Artificial Sequence
  synthetic construct; Sulfonylurea responsive repressor
MGSRLDKSKVINSALELLNEVGIEGLTTRKLAQKLGVEQPTLYWHVKNKRALLDAMAIEMLDRHATHYCPLEGESWQDFLRNNAKSMRCALLSHRDGAKVCLGTGFTEQQYEAAENSMAFLCQQGFSLEHALYAMQAACIYTLGCVLLDQELQVAKEERETPTTDSMPPLVRQALELKDHQGAEPAFLFGLELIICGLEKQLKCESGS

SEQ ID NO: 360 - protein, 208 aa, Artificial Sequence; identical to SEQ ID NO: 309
  synthetic construct; Sulfonylurea responsive repressor

SEQ ID NO: 361 - protein, 208 aa, Artificial Sequence
  synthetic construct; Sulfonylurea responsive repressor
MGSRLDKSKVINSALELLNEVGIEGLTTRKLAQKLGVEQPTLYWHVKNKRALLDAMAIEMLDRHATHYCPLEGESWQDFLRNNAKSMRCALLSHRDGAKVCLGTGFTEQHYESAENSLAFLCQQGFSLEHAMYAMQAVGIYTLGCVLLDQELQVAKEERETPTTDSMPPLVRQALELKDHQGAEPAFLFGLELIICGLEKQLKCESGS

SEQ ID NO: 362 - protein, 208 aa, Artificial Sequence
  synthetic construct; Sulfonylurea responsive repressor
  MISC_FEATURE (138)..(138): Xaa = any amino acid
MGSRLDKSKVINSALELLNEVGIEGLTTRKLAQKLGVEQPTLYWHVKNKRALLDAMAIEMLDRHATHYCPLEGESWQDFLRNNAKSMRCALLSHRDGAKVCLGTGFTEQQYEAAENSMAFLCQQGFSLEHAMYAMQAXGIYTLGCVLLDQELQVAKEERETPTTDSMPPLVRQALELKDHQGAEPAFLFGLELIICGLEKQLKCESGS

SEQ ID NO: 363 - protein, 208 aa, Artificial Sequence
  synthetic construct; Sulfonylurea responsive repressor
MGSRLDKSKVINSALELLNEVGIEGLTTRKLAQKLGVEQPTLYWHVKNKRALLDAMAIEMLDRHATHYCPLEGESWQDFLRNNAKSMRCALLSHRDGAKVCLGTGFTEQQYETAENSMAFLCQQGFSLEHAMYAMQAAGIYTLGCVLLDQELQVAKEERETPTTDSMPPLLRQALELKDHQGAEPAFLFGLELIICGLEKQLKCESGS

SEQ ID NO: 364 - protein, 208 aa, Artificial Sequence
  synthetic construct; Sulfonylurea responsive repressor
MGSRLDKSKVINSALELLNEVGIEGLTTRKLAQKLGVEQPTLYWHVKNKRALLDAMAIEMLDRHATHFCPLEGESWQDFLRNNAKSMRCALLSHRDGAKVCLGTGFTEQQYETAENSLAFLCQQGFSLENALYAMQAACIYTLGCVLLDQELQVAKEERETPTTDSMPPLVRQALELKDHQGAEPAFLFGLELIICGLEKQLKCESGS

SEQ ID NO: 365 - protein, 208 aa, Artificial Sequence
  synthetic construct; Sulfonylurea responsive repressor
MGSRLDKSKVINSALELLNEVGIEGLTTRKLAQKLGVEQPTLYWHVKNKRALLDAMAIEMLDRHATHYCPLEGESWQDFLRNNAKSMRCALLSHRDGAKVCLGTGFTEQQYESAENSMAFLCQQGFSLENAMYAMQAAGIYTLGCVLLDQELQVAKEERETPTTDSMPPLVRQGLELKDHQGAEPAFLFGLELIICGLEKQLKCESGS

SEQ ID NO: 366 - protein, 208 aa, Artificial Sequence
  synthetic construct; Sulfonylurea responsive repressor
MGSRLDKSKVINSALELLNEVGIEGLTTRKLAQKLGVEQPTLYWHVKNKRALLDAMAIEMLDRHATHMCPLEGESWQDFLRNNAKSMRCALLSHRDGAKVCLGTGFTEQQYESAENSMAFLCQQGFSLEHAMYAMQAAGIYTLGCVLLDQELQVAKEERETPTTDSMPPLLRQALELKDHQGAEPAFLFGLELIICGLEKQLKCESGS

SEQ ID NO: 367 - protein, 208 aa, Artificial Sequence
  synthetic construct; Sulfonylurea responsive repressor
  MISC_FEATURE (68)..(68): Xaa = any amino acid
  MISC_FEATURE (112)..(112): Xaa = any amino acid
  misc_feature (113)..(113): Xaa can be any naturally occurring amino acid
  MISC_FEATURE (171)..(171): Xaa = any amino acid
  MISC_FEATURE (174)..(174): Xaa = any amino acid
MGSRLDKSKVINSALELLNEVGIEGLTTRKLAQKLGVEQPTLYWHVKNKRALLDAMAIEMLDRHATHXCPLEGESWQDFLRNNAKSMRCALLSHRDGAKVCLGTGFTEQQYEXAENSMAFLCQQGFSLENAMYAMQAVGIYTLGCVLLDQELQVAKEERETPTTDSMPPLXRQXLELKDHQGAEPAFLFGLELIICGLEKQLKCESGS

SEQ ID NO: 368 - protein, 208 aa, Artificial Sequence
  synthetic construct; Sulfonylurea responsive repressor
MGSRLDKSKVINSALELLNEVGIEGLTTRKLAQKLGVEQPTLYWHVKNKRALLDALAIEMLDRHATHYCPLEGESWQDFLRNNAKSMRCALLSHRDGAKVCLGTGFTEQHYEAAENSMAFLCQQGFSLENAMYAMQAVGIFTLGCVLLDQELQVAKEERETPTTDSMPPLVRQALELKDHQGAEPAFLFGLELIICGLEKQLKCESGS

SEQ ID NO: 369 - protein, 208 aa, Artificial Sequence
  synthetic construct; Sulfonylurea responsive repressor
MGSRLDKSKVINSALELLNEVGIEGLTTRKLAQKLGVEQPTLYWHVKNKRALLDALAIEMLDRHATHYCPLEGESWQDFLRNNAKSMRCALLSHRDGAKVCLGTGFTEQMYESAENSMAFLCQQGFSLEHAMYAMQAAGIYTLGCVLLDQELQVAKEERETPTTDSMPPLLRQALELKDHQGAEPAFLFGLELIICGLEKQLKCESGS

SEQ ID NO: 370 - protein, 208 aa, Artificial Sequence
  synthetic construct; Sulfonylurea responsive repressor
  MISC_FEATURE (110)..(110): Xaa = any amino acid
  MISC_FEATURE (113)..(113): Xaa = any amino acid
  MISC_FEATURE (141)..(141): Xaa = any amino acid
  MISC_FEATURE (171)..(171): Xaa = any amino acid
MGSRLDKSKVINSALELLNEVGIEGLTTRKLAQKLGVEQPTLYWHVKNKRALLDAMAIEMLDRHATHYCPLEGESWQDFLRNNAKSMRCALLSHRDGAKVCLGTGFTEQXYEXAENSLAFLCQQGFSLEHALYAMQAACIXTLGCVLLDQELQVAKEERETPTTDSMPPLXRQGLELKDHQGAEPAFLFGLELIICGLEKQLKCESGS

SEQ ID NO: 371 - protein, 208 aa, Artificial Sequence
  synthetic construct; Sulfonylurea responsive repressor
MGSRLDKSKVINSALELLNEVGIEGLTTRKLAQKLGVEQPTLYWHVKNKRALLDAMAIEMLDRHATHYCPLEGESWQDFLRNNAKSMRCALLSHRDGAKVCLGTGFTEQQYESAENSMAFLCQQGFSLEHAMYAMQAVGIYTLGCVLLDQELQVAKEERETPTTDSMPPLLRQALELKDHQGAEPAFLFGLELIICGLEKQLKCESGS

SEQ ID NO: 372 - protein, 208 aa, Artificial Sequence
  synthetic construct; Sulfonylurea responsive repressor
MGSRLDKSKVINSALELLNEVGIEGLTTRKLAQKLGVEQPTLYWHVKNKRALLDAMAIEMLDRHATHVCPLEGESWQDFLRNNAKSMRCALLSHRDGAKVCLGTGFTEQHYESAENSLAFLCQQGFSLEHALYAMQAVGIYTLGCVLLDQELQVAKEERETPTTDSMPPLVRQALELKDHQGAEPAFLFGLELIICGLEKQLKCESGS

SEQ ID NO: 373 - protein, 208 aa, Artificial Sequence
  synthetic construct; Sulfonylurea responsive repressor
MGSRLDKSKVINSALELLNEVGIEGLTTRKLAQKLGVEQPTLYWHVKNKRALLDAMAIEMLDRHATHFCPLEGESWQDFLRNNAKSMRCALLSHRDGAKVCLGTGFTEQQYETAENSLAFLCQQGFSLENAMYAMQAVGIYTLGCVLLDQELQVAKEERETPTTDSMPPLVRQGLELKDHQGAEPAFLFGLELIICGLEKQLKCESGS

SEQ ID NO: 374 - protein, 208 aa, Artificial Sequence
  synthetic construct; Sulfonylurea responsive repressor
MGSRLDKSKVINSALELLNEVGIEGLTTRKLAQKLGVEQPTLYWHVKNKRALLDAMAIEMLDRHATHYCPLEGESWQDFLRNNAKSMRCALLSHRDGAKVCLGTGFTEQQYETAENSLAFLCQQGFSLENALYAMQAACIYTLGCVLLDQELQVAKEERETPTTDSMPPLVRQVLELKDHQGAEPAFLFGLELIICGLEKQLKCESGS

SEQ ID NO: 375 - protein, 208 aa, Artificial Sequence
  synthetic construct; Sulfonylurea responsive repressor
  MISC_FEATURE (8)..(10): Xaa = any amino acid
MGSRLDKXXXINSALELLNEVGIEGLTTRKLAQKLGVEQPTLYWHVKNKRALLDAMAIEMLDRHATHYCPLEGESWQDFLRNNAKSMRCALLSHRDGAKVCLGTGFTEQQYDTAENSLAFLCQQGFSLENALYAMQAVGIYTLGCVLLDQELQVAKEERETPTTDSMPPLVRQVLELKDHQGAEPVFLFGLELIICGLEKQLKCESGS

SEQ ID NO: 376 - protein, 208 aa, Artificial Sequence
  synthetic construct; Sulfonylurea responsive repressor
MGSRLDKSKVINSALELLNEVGIEGLTTRKLAQKLGVEQPTLYWHVKNKRALLDALAIEMLDRHATHYCPLEGESWQDFLRNNALSMRCALLSHRDGAKVCLGTGFTEKQYETAENSMAFLCQQGFSLEHAMYAMQAAGIYTLGCVLLDQELQVAKEERETPTTDSMPPLVRQALELKDHQGAEPAFLFGLELIICGLEKQLKCESGS

SEQ ID NO: 377 - protein, 208 aa, Artificial Sequence
  synthetic construct; Sulfonylurea responsive repressor
MGSRLDKSKVINSALELLNEVGIEGLTTRKLAQKLGVEQPTLYWHVKNKRALLDAMAIEMLDRHATHYCPLEGESWQDFLRNNAKSMRCALLSHRDGAKVCLGTGFTEQQYETAENSLAFLCQQGFSLENAMYAMQAVGIYTLGCVLLDQELQVAKEERETPTTDSMPPLLRQVLELKDHQGAEPAFLFGLELIICGLEKQLKCESGS

SEQ ID NO: 378 - protein, 208 aa, Artificial Sequence
  synthetic construct; Sulfonylurea responsive repressor
  MISC_FEATURE (7)..(9): Xaa = any amino acid
MGSRLDXXXVINSALELLNEVGIEGLTTRKLAQKLGVEQPTLYWHVKNKRALLDAMAIEMLDRHATHYCPLEGESWQDFLRNNAKSMRCALLSHRDGAKVCLGTGFTEQQYEAAENSMAFLCQQGFSLEHAMYAMQAACIYTLGCVLLDQELQVAKEERETPTTDSMPPLVRQALELKDHQGAEPAFLFGLELIICGLEKQLKCESGS

SEQ ID NO: 379 - protein, 208 aa, Artificial Sequence
  synthetic construct; Sulfonylurea responsive repressor
  MISC_FEATURE (55)..(55): Xaa = any amino acid
  misc_feature (56)..(56): Xaa can be any naturally occurring amino acid
  MISC_FEATURE (110)..(110): Xaa = any amino acid
  MISC_FEATURE (171)..(171): Xaa = any amino acid
MGSRLDKSKVINSALELLNEVGIEGLTTRKLAQKLGVEQPTLYWHVKNKRALLDAXAIEMLDRHATHYCPLEGESWQDFLRNNAKSMRCALLSHRDGAKVCLGTGFTEQXYEIAENSLAFLCQQGFSLEHAMYAMQAAGIYTLGCVLLDQELQVAKEERETPTTDSMPPLXRQALELKDHQGAEPAFLFGLELIICGLEKQLKCESGS

SEQ ID NO: 380 - protein, 208 aa, Artificial Sequence
  synthetic construct; Sulfonylurea responsive repressor
MGSRLDKSKVINSALELLNEVGIEGLTTRKLAQKLGVEQPTLYWHVKNKRALLDALAIEMLDRHATHYCPLEGESWQDFLRNNAKSMRCALLSHRDGAKVCLGTGFTEKQYEAAENSLAFLCQQGFSLEHALYAMQAVGIYTLGCVLLDQELQVAKEERETPTTDSMPPLVRQVLELKDHQGAEPAFLFGLELIICGLEKQLKCESGS

SEQ ID NO: 381 - protein, 208 aa, Artificial Sequence
  synthetic construct; Sulfonylurea responsive repressor
  MISC_FEATURE (8)..(10): Xaa = any amino acid
  MISC_FEATURE (19)..(19): Xaa = any amino acid
MGSRLDKXXXINSALELLXEVGIEGLTTRKLAQKLGVEQPTLYWHVKNKRALLDAMAIEMLDRHATHYCPLEGESWQDFLRNNAKSMRCALLSHRDGAKVCLGTGFTEKLYESAENSLAFLCQQGFSLENAMYAMQAVCIFTLGCVLLDQELQVAKEERETPTTDSMPPLLRQGLELKDHQGAEPAFLFGLELIICGLEKQLKCESGS

SEQ ID NO: 382 - protein, 208 aa, Artificial Sequence
  synthetic construct; Sulfonylurea responsive repressor
MGSRLDKSKVINSALELLNEVGIEGLTTRKLAQKLGVEQPTLYWHVKNKRALLDAMAIEMLDRHATHYCPLEGESWQDFLRNNAKSMRCALLSHRDGAKVCLGTGFTEQQYESAENSLAFLCQQGFSLEHAMYAMQAVGIFTLGCVLLDQELQVAKEERETPTTDSMPPLLRQALELKDHQGAEPAFLFGLELIICGLEKQLKCESGS

SEQ ID NO: 383 - protein, 208 aa, Artificial Sequence
  synthetic construct; Sulfonylurea responsive repressor
MGSRLDKSKVINSALELLNEVGIEGLTTRKLAQKLGVEQPTLYWHVKNKRALLDALAIEMLDRHATHYCPLEGESWQDFLRNNAKSMRCALLSHRDGAKVCLGTGFTEQMYEGAENSMAFLCQQGFSLEHAMYAMQAAGIYTLGCVLLDQELQVAKEERETPTTDSMPPLVRQALELKDHQGAEPAFLFGLELIICGLEKQLKCESGS

SEQ ID NO: 384 - protein, 208 aa, Artificial Sequence
  synthetic construct; Sulfonylurea responsive repressor
  MISC_FEATURE (9)..(10): Xaa = any amino acid
  MISC_FEATURE (139)..(139): Xaa = any amino acid
MGSRLDKSXXINSALELLNEVGIEGLTTRKLAQKLGVEQPTLYWHVKNKRALLDAMAIEMLDRHATHYCPLEGESWQDFLRNNAKSMRCALLSHRDGAKVCLGSGFTEQQYETAENSMAFLCQQGFSLENAMYAMQAAXIFTLGCVLLDQELQVAKEERETPTTDSMPPLVRQVLELKDHQGAEPAFLFGLELIICGLEKQLKCESGS

SEQ ID NO: 385 - protein, 208 aa, Artificial Sequence
  synthetic construct; Sulfonylurea responsive repressor
  MISC_FEATURE (18)..(19): Xaa = any amino acid
  MISC_FEATURE (21)..(21): Xaa = any amino acid
MGSRLDKSKVINSALELXXEXGIEGLTTRKLAQKLGVEQPTLYWHVKNKRALLDAMAIEMLDRHATHICPLEEESWQDFLRNNAKSMRCALLSHRDGAKVCLGTGFTEQQYETAENSMAFLCQQGFSLEHAMYAMQAACIYTLGCVLLDQELQVAKEERETPTTDSMPPLVRQVLELKDHQGAEPAFLFGLELIICGLEKQLKCESGS

SEQ ID NO: 386 - protein, 208 aa, Artificial Sequence
  synthetic construct; Sulfonylurea responsive repressor
  MISC_FEATURE (8)..(10): Xaa = any amino acid
MGSRLDKXXXINSALELLNEVGIEGLTTRKLAQKLGVEQPTLYWHVKNKRALLDAMAIEMLDRHATHVCPLEGESWQDFLRNNAKSMRCALLSHRDGAKVCLGTGFTEQQYESAENSLAFLCQQGFSLEHAMYAMQAAGIFTLGCVLLDQELQVAKEERETPTTDSMPPLVRQALELKDHQGAEPAFLFGLELIICGLEKQLKCESGS

SEQ ID NO: 387 - protein, 208 aa, Artificial Sequence
  synthetic construct; Sulfonylurea responsive repressor
  MISC_FEATURE (6)..(7): Xaa = any amino acid
MGSRLXXSKVINSALELLNEVGIEGLTTRKLAQKLGVEQPTLYWHVKNKRALLDAMAIEMLDRHATHMCPLEGESWQDFLRNNAKSMRCALLSHRDGAKVCLGTGFTEQHYETAENSMAFLCQQGFSLENAMYAMQAAGIYTLGCVLLDQELQVAKEERETPTTDSMPPLVRQVLELKDHQGAEPAFLFGLELIICGLEKQLKCESGS

SEQ ID NO: 388 - protein, 208 aa, Artificial Sequence
  synthetic construct; Sulfonylurea responsive repressor
  MISC_FEATURE (9)..(9): Xaa = any amino acid
  MISC_FEATURE (19)..(19): Xaa = any amino acid
MGSRLDKSXVINSALELLXEVGIEGLTTRKLAQKLGVEQPTLYWHVKNKRALLDAMAIEMLDRHATHYCPLEGESWQDFLRNNAKSMRCALLSHRDGAKVCLGTGFTEQQYEAAENSLAFLCQQGFSLENALYAMQAVGIFTLGCVLLDQELQVAKEERETPTTDSMPPLVRQGLELKDHQGAEPAFLFGLELIICGLEKQLKCESGS

SEQ ID NO: 389 - protein, 208 aa, Artificial Sequence
  synthetic construct; Sulfonylurea responsive repressor
MGSRLDKSKVINSALELLNEVGIEGLTTRKLAQKLGVEQPTLYWHVKNKRALLDAMAIEMLDRHATHYCPLEGESWQDFLRNNAKSMRCALLSHRDGAKVCLGTGFTEQQYESAENSLAFLCQQGFSLENAMYAMQAAGIFTLGCVLLDQELQVAKEERETPTTDSMPPLVRQALELKDHQGAEPAFLFGLELIICGLEKQLKCESGS

SEQ ID NO: 390 - protein, 208 aa, Artificial Sequence
  synthetic construct; Sulfonylurea responsive repressor
MGSRLDKSKVINSALELLNEVGIEGLTTRKLAQKLGVEQPTLYWHVKNKRALLDAMAIEMLDRHATHFCPLEGESWQDFLRNNAKSMRCALLSHRDGAKVCLGTGFTEQHYESAENSLAFLCQQGFSLENAMYAMQAVGIYTLGCVLLDQELQVAKEERETPTTDSMPPLVRQVLELKDHQGAEPAFLFGLELIICGLEKQLKCESGS

SEQ ID NO: 391 - protein, 208 aa, Artificial Sequence
  synthetic construct; Sulfonylurea responsive repressor
  MISC_FEATURE (6)..(6): Xaa = any amino acid
MGSRLXKSKVINSALELLNEVGIEGLTTRKLAQKLGVEQPTLYWHVKNKRALLDAMAIEMLDRHATHVCPLEGESWQDFLRNNAKSMRCALLSHRDGAKVCLGTGFTEQQYETAENSLAFLCQQGFSLEHALYAMQAVGIYTLGCVLLDQELQVAKEERETPTTDSMPPLVRQVLELKDHQGAEPAFLFGLELIICGLEKQLKCESGS

SEQ ID NO: 392 - protein, 208 aa, Artificial Sequence
  synthetic construct; Sulfonylurea responsive repressor
  MISC_FEATURE (5)..(7): Xaa = any amino acid
  MISC_FEATURE (9)..(9): Xaa = any amino acid
MGSRXXXSXVINSALELLNEVGIEGLTTRKLAQKLGVEQPTLYWHVKNKRALLDALAIEMLDRHATHYCPLEGESWQDFLRNNAKSMRCALLSHRDGAKVCLGTGFTEKQYEAAENSMAFLCQQGFSLEHALYAMQAVGIYTLGCVLLDQELQVAKEERETPTTDSMPPLVRQALELKDHQGAEPAFLFGLELIICGLEKQLKCESGS

SEQ ID NO: 393 - protein, 209 aa, Artificial Sequence
  synthetic construct; Sulfonylurea responsive repressor
  MISC_FEATURE (6)..(10): Xaa = any amino acid
  MISC_FEATURE (209)..(209): Xaa = any amino acid
MGSRLXXXXXINSALELLNEVGIEGLTTRKLAQKLGVEQPTLYWHVKNKRALLDAMAIEMLDRHATHYCPLEGESWQDFLRNNAKSMRCALLSHRDGAKVCLGTGFTEQQYESAENSMAFLCQQGFSLENAMYAMQAAGIFTLGCVLLDQELQVAKEERETPTTDSMPPLLRQVLELKDHQGAEPAFLFGLELIICGLEKQLKCESGSX

SEQ ID NO: 394 - protein, 208 aa, Artificial Sequence
  synthetic construct; Sulfonylurea responsive repressor
  misc_feature (7)..(7): Xaa can be any naturally occurring amino acid
  MISC_FEATURE (9)..(9): Xaa = any amino acid
  MISC_FEATURE (10)..(10): Xaa = any amino acid
  MISC_FEATURE (19)..(19): Xaa = any amino acid
MGSRLDXSXXINSALELLXEVGIEGLTTRKLAQKLGVEQPTLYWHVKNKRALLDAMAIEMLDRHATHFCPLEGESWQDFLRNNAKSMRCALLSHRDGAKVCLGTGFTEQQYEAAENSMAFLCQQGFSLENAMYAMQAVGIFTLGCVLLDQELQVAKEERETPTTDSMPPLVRQVLELKDHQGAEPAFLFGLELIICGLEKQLKCESGS

SEQ ID NO: 395 - protein, 208 aa, Artificial Sequence
  synthetic construct; Sulfonylurea responsive repressor
  MISC_FEATURE (6)..(6): Xaa = any amino acid
  MISC_FEATURE (7)..(7): Xaa = any amino acid
MGSRLXXSKVINSALELLNEVGIEGLTTRKLAQKLGVEQPTLYWHVKNKRALLDAMAIEMLDRHATHYCPLEGESWQDFLRNNAKSMRCALLSHRDGAKVCLGTGFTEQQYETAENSMAFLCQQGFSLEHAMYAMQAVGIYTLGCVLLDQELQVAKEERETPTTDSMPPLLRQVLELKDHQGAEPAFLFGLELIICGLEKQLKCESGS

SEQ ID NO: 396 - protein, 208 aa, Artificial Sequence
  synthetic construct; Sulfonylurea responsive repressor
MGSRLDKSKVINSALELLNEVGIEGLTTRKLAQKLGVEQPTLYWHVKNKRALLDAMAMEMLDRHATHYCPLEGESWQDFLRNNAKSMRCALLSHRDGAKVCLGTGFTEQQYESAENSMAFLCQQGFSLENALYAMQAVGIYTLGCVLLDQELQVAKEERETPTTDSMPPLVRQGLELKDHQGAEPAFLFGLELIICGLEKQLKCESGS

SEQ ID NO: 397 - protein, 208 aa, Artificial Sequence
  synthetic construct; Sulfonylurea responsive repressor
  MISC_FEATURE (179)..(179): Xaa = any amino acid
MGSRLDKSKVINSALELLNEVGIEGLTTRKLAQKLGVEQPTLYWHVKNKRALLDALAIEMLDRHATHYCPLEGESWQDFLRNNAKSMRCALLSHRDGAKVCLGTGFTEQQYEAAENSLAFLCQQGFSLEHALYAMQAAGIYTLGCVLLDQELQVAKEERETPTTDSMPPLLRQGLELKXHQGAEPAFLFGLELIICGLEKQLKCESGS

SEQ ID NO: 398 - protein, 208 aa, Artificial Sequence
  synthetic construct; Sulfonylurea responsive repressor
  MISC_FEATURE (5)..(9): Xaa = any amino acid
MGSRXXXXXVINSALELLNEVGIEGLTTRKLAQKLGVEQPTLYWHVKNKRALLDAMAIEMLDRHATHYCPLEGESWQDFLRNNAKSMRCALLSHRDGAKVCLGTGFTEQQYETAENSLAFLCQQGFSLENAMYAMQAAGIYTLGCVLLDQELQVAKEERETPTTDSMPPLLRQVLELKDHQGAEPAFLFGLELIICGLEKQLKCESGS

SEQ ID NO: 399 - protein, 208 aa, Artificial Sequence; identical to SEQ ID NO: 301
  synthetic construct; Sulfonylurea responsive repressor

SEQ ID NO: 400 - protein, 208 aa, Artificial Sequence
  synthetic construct; Sulfonylurea responsive repressor
MGSRLDKSKVINSALELLNEVGIEGLTTRKLAQKLGVEQPTLYWHVKNKRALLDAMAIEMLDRHATHYCPLEGESWQDFLRNNAKSMRCALLSHRDGAKVCLGTGFTEQQYETAENSMAFLCQQGFSLENALYAMQAAGIFTLGCVLLDQELQVAKEERETPTTDSMPPLVRQVLELKDHQGAEPAFLFGLELIICGLEKQLKCESGS

SEQ ID NO: 401 - protein, 208 aa, Artificial Sequence
  synthetic construct; Sulfonylurea responsive repressor
MGSRLDKSKVINSALELLNEVGIEGLTTRKLAQKLGVEQPTLYWHVKNKRALLDAMAIEMLDRHATHICPLEGESWQDFLRNNAKSMRCALLSHRDGAKVCLGTGFTEQQYETAENSMAFLCQQGFSLENAMYAMQAVCIYTLGCVLLDQELQVAKEERETPTTDSMPPLVRQALELKDHQGAEPAFLFGLELIICGLEKQLKCESGS

SEQ ID NO: 402 - protein, 208 aa, Artificial Sequence
  synthetic construct; Sulfonylurea responsive repressor
MGSRLDKSKVINSALELLNEVGIEGLTTRKLAQKLGVEQPTLYWHVKNKRALLDALAIEMMDRHQTHLCPLEGESWQDFLRNNAKSMRCALLSHRDGAKVCLGTRWTEQMYEAAENMLAFLCQQGFSLENALYAVSAVRVFTLGCVLFDQESQVAKEERETPTTASMPPLVRQAWELKDHQGAEPAFLFGLELIICGLEKQLKCESGS

SEQ ID NO: 403 - protein, 208 aa, Artificial Sequence
  synthetic construct; Sulfonylurea responsive repressor
  MISC_FEATURE (9)..(9): Xaa = any amino acid
MGSRLDKSXVINSALELLNEVGIEGLTTRKLAQKLGVEQPTLYWHVKNKRALLDAMAIEMLDRHATHYCPLEGESWQDFLRNNAKSMRCALLSHRDGAKVCLGTGFTEQQYEAAENSLAFLCQQGFSLENALYAMQAVGIFTLGCVLLDQELQVAKEERETPTTDSMPPLVRQGLELKDHQGAEPAFLFGLELIICGLEKQLKCESGS

SEQ ID NO: 404 - protein, 207 aa, Artificial Sequence
  synthetic construct; Sulfonylurea responsive repressor
MARLDKSKVINSALELLNEVGIEGLTTRKLAQKLGVEQPTLYWHVKNKRALLDAMAIEMLDRHAPHLSLLEGESWQDFLRNNAKSMRNALLSHRDGAKVCLGTGFTEQNYETAENSLAFLTQQGFSLENALYAWQALGIYTLGCALLDQELQVAKEERETPTTDSMPPLVRQALELKDHQGAEPAFLFGLELIIAGLEKQLKAESGS

SEQ ID NO: 405 - protein, 207 aa, Artificial Sequence
  synthetic construct; Sulfonylurea responsive repressor
MARLDKSKVINSALELLNEVGIEGLTTRKLAQKLGVEQPTLYWHVKNKRALLDAMAIEMFDRHKTHYCPLEGESWQDFLRNRAKSMRNALLSHRDGAKVALGTGFTEQQYETMENCLAFLTQQGFSLENALYAMQAVGIYTLGCVLLDQELQVAKEERETPTTDSMPPLVRQAYELRDHQGAEPAFLFGLELIISGLEKQLKAESGS

SEQ ID NO: 406 - protein, 207 aa, Artificial Sequence
  synthetic construct; Sulfonylurea responsive repressor
MARLDKSKVINSALELLNEVGIEGLTTRKLAQKLGVEQPTLYWHVKNKRALLDAMAFEMLDRHAIHFLPLEGASWQNFLRNTAKSMRNALLSHRDGAKVCLGTGFTERQYETAENRLAFLTQQGFSLEQALYAWQAVGIYTLGCVLLDQELQVAKEERETPTTDSMPPLVRQAWELKDHQGAEPAFLFGLELIISGLEKQLKAESGS

SEQ ID NO: 407 - protein, 207 aa, Artificial Sequence
  synthetic construct; Sulfonylurea responsive repressor
MARLDKSKVINSALELLNEVGIEGLTTRKLAQKLGVEQPTLYWHVKNKRALLDAMAIEMLDRHAIHLLPLEGESWQDFLRNNAKSMRCALLSHRDGAKVCLGTGFTEQQYETAENRLAFLTQQGFSLENALYAWQAVGIYTLGCVLLDQELQVAKEERETPTTDSMPPLVRQALELKDHQGAEPAFLFGLELIIGGLEKQLKSESGS

SEQ ID NO: 408 - protein, 207 aa, Artificial Sequence
  synthetic construct; Sulfonylurea responsive repressor
MARLDKSKVINSALELLNEVGIEGLTTRKLAQKLGVEQPTLYWHVKNKRALLDAMAIEMLDRHATHVCPLEGESWQDFLRNNAKIMRCALLSHRDGAKVCLGTGFTEQQYETAENSLAFLCQQGFSLEHALYAMQAAGIFTLGCVLLDQELQVAKEERETPTTDSMPPLVRQALELNDHQGAEPAFLFGLELIICGLEKQLKCESGS

SEQ ID NO: 409 - protein, 207 aa, Artificial Sequence
  synthetic construct; Sulfonylurea responsive repressor
MARLDKSKVINSALELLNEVGIEGLTTRKLAQKLGVEQPTLYWHVKNKRALLDAMAIEMLDRHATHYCPLEGESWQDFLRNNAKSMRCALLSHRDGAKVCLGTGFTEQQYETAENSLAFLCQQGFSLENALYAMQAVGIYTLGCVLLDQELQVAKEERETPTTDSMPPLVRQALELKDHQGAEPAFLFGLELIICGLEKQLKCESGS

SEQ ID NO: 410 - protein, 207 aa, Artificial Sequence
  synthetic construct; Sulfonylurea responsive repressor
MARLDKSKVINSALELLNEVGIEGLTTRKLAQKLGVEQPTLYWHVKNKRALLDAMAIEMLDRHATHYCPLEGESWQDFLRNNAKSMRCALLSHRDGAKVCLGTGFTEQQYETAENSMAFLCQQGFSLENALYAMQAVGIYTLGCVLLDQELQVAKEERETPTTDSMPPLVRQALELKDHQGAEPAFLFGLELIICGLEKQLKCESGS

SEQ ID NO: 411 - protein, 207 aa, Artificial Sequence
  synthetic construct; Sulfonylurea responsive repressor
MARLDKSKVINSALELLNEVGIEGLTTRKLAQKLGVEQPTLYWHVKNKRALLDAMAIEMLDRHATHYCPLEGESWQDFLRNNAKSMRCALLSHRDGAKVCLGTGFTEQQYETAENSLAFLCQQGFSLEHAMYAMQAAGIYTLGCVLLDQELQVAKEERETPTTDSMPPLVRQALELKDHQGAEPAFLFGLELIICGLEKQLKCESGS

SEQ ID NO: 412 - protein, 208 aa, Artificial Sequence
  synthetic construct; Sulfonylurea responsive repressor
MGSRLDKSKVINSALELLNEVGIEGLTTRKLAQKLGVEQPTLYWHVKNKRALLDALAIEMLDRHLTHFCPLEGESWQDFLRNNAKSMRCALLSHRDGAKVWLGTGFTEKQYETKENRLAFLCQQGFSLENALYAIRAVSRFTLGCVLQDQEPQVAKEERETPTTDSMPPLLRQAVELFDHQGAEPAFLFGLELIICGLEKQLKCESES

SEQ ID NO: 413 - protein, 208 aa, Artificial Sequence
  synthetic construct; Sulfonylurea responsive repressor
MGSRLDKSKVINSALELLNEVGIEGLTTRKLAQKLGVEQPTLYWHVKNKRALLDALAIEMLDRHATHFCPLEGESWQDFLRNNAKSFRCALLSHRDGAKVCLGTAGTEKQYETLENCLAFLCQQGFSLENALYARSAVVCFTLGCVLFDQEMQVAKEERETPTTDSMPPLLRQAAELLDHQGAEPAFLFGLELIICGLEKQLKCESGS

SEQ ID NO: 414 - protein, 208 aa, Artificial Sequence
  synthetic construct; Sulfonylurea responsive repressor
MGSRLDKSKVINSALELLNEVGIEGLTTRKLAQKLGVEQPTLYWHVKNKRALLDALAIEMLDRHATHFCPLEGESWQDFLRNTAKSMRCALLSHRDGAKVLLGTATTEKQYETLENLLAFLYQQGFSLENALYAWQAVWRFTLGCVLIDQETQVAKEERETPTTDSMPPLLRQAVELKDHQGAEPAFLFGLELIICGLEKQLKCETGS

SEQ ID NO: 415 - protein, 208 aa, Artificial Sequence
  synthetic construct; Sulfonylurea responsive repressor
MGSRLDKSKVINSALELLNEVGIEGLTTRKLAQKLGVEQPTLYWHVKNKRALLDALAIEMLDRHATHFCPLEGESWQDFLRNNAKSMRCALLSHRDGAKVQLGTAATEKQYETLENKLAFLCQQGFSLENALYAHSAVTQFTLGCVLRDQEGQVAKEERETPTTDSMPPLLRQARELRDHQGAEPAFLFGLELIICGLEKQLKCESGS

SEQ ID NO: 416 - protein, 208 aa, Artificial Sequence
  synthetic construct; Sulfonylurea responsive repressor
MGSRLDKSKVINSALELLNEVGIEGLTTRKLAQKLGVEQPTLYWHVKNKRALLDALAIEMADRHNTHFCPLEGESWQDFLRNAARSMRCALLSHRDGAKVYLGTARTEKQYETTENVLAFLCQQGFSLENALYAVRAVPRFTLGCVLLDQERQVAKEERETPTTDSMPPLLRQARELTDHQGAEPAFLFGLELIICGLEKQLKCESGS

SEQ ID NO: 417 - protein, 208 aa, Artificial Sequence
  synthetic construct; Sulfonylurea responsive repressor
MGSRLDKSKVINSALELLNEVGIEGLTTRKLAQKLGVEQPTLYWHVKNKRALLDALAIEMADRHHTHFCPLEGESWQDFLRNAAKSMRCALLSHRDGAKVRLGTAWTEKQYETHENVLAFLCQQGFSLENALYALKAVSGFTLGCVLKDQEMQVAKEERETPTTDSMPPLLRQATELVDHQGAEPAFLFGLELIICGLEKQLKCESGS

SEQ ID NO: 418 - protein, 208 aa, Artificial Sequence
  synthetic construct; Sulfonylurea responsive repressor
MGSRLDKSKVINSALELLNEVGIEGLTTRKLAQKLGVEQPTLYWHVKNKRALLDALAIEMMDRHQTHFCPLEGESWQDFLRNTAKSYRCALLSHRDGAKVILGTRWTEKQYETRENVLAFLCQQGFSLENALYAWAAVGPFTLGCVLRDQERQVAKEERETPTTDSMPPLLRQALELMDHQGAEPAFLFGLELIICGLEKQLKCESGS

SEQ ID NO: 419 - protein, 208 aa, Artificial Sequence
  synthetic construct; Sulfonylurea responsive repressor
MGSRLDKSKVINSALELLNEVGIEGLTTRKLAQKLGVEQPTLYWHVKNKRALLDALAIEMLDRNQTHFCPLEGESWQDFLRNNAKSWRCALLSHRDGAKVMLGTRNTEKQYETAENGLAFLCQQGFSLENALYACRAVWTFTLGCVLDDQETQVAKEERETPTSDSMPPLLRQAMELKDHQGAEPAFLFGLELIICGLEKQLKCESGS

SEQ ID NO: 420 - DNA, 627 bp, Artificial Sequence
  synthetic construct; Sulfonylurea responsive repressor
atgggatctagattagataaaagtaaagtgattaacagcgcattagagctgcttaatgaggtcggaatcgaaggtttaacaacccgtaaactcgcccagaagctaggtgtagagcagcctacattgtattggcatgtaaaaaataagcgagctctgctcgacgccttagccattgagatgctggataggcacgcgactcacttttgccctttagaaggggaaagctggcaagattttttacgtaataacgctaaaagttttagatgtgctttactaagtcatcgcgatggagcaaaagtatgtttaggtacagcggtgacagaaaaacagtatgaaactatggaaaatattttagcctttttatgccaacaaggtttttcactagagaatgcattatatgcaaggcgcgctgtgattgcgtttactttaggttgcgtattgtgggatcaagagtatcaagtcgctaaagaagaaagggaaacacctactactgatagtatgccgccattattacgacaagctagggaattaattgatcaccaaggtgcagagccagccttcttattcggccttgaattgatcatatgcggattagaaaaacaacttaaatgtgaaagtgggtcttaa

SEQ ID NO: 421 - DNA, 627 bp, Artificial Sequence
  synthetic construct; Sulfonylurea responsive repressor
atgggatctagattagataaaagtaaagtgattaacagcgcattagagctgcttaatgaggtcggaatcgaaggtttaacaacccgtaaactcgcccagaagctaggtgtagagcagcctacattgtattggcatgtaaaaaataagcgagctctgctcgacgccttagccattgagatgctggataggcacaatactcacttttgccctttagaaggggaaagctggcaagattttttacgtaataacgctaaaagttggagatgtgctttactaagtcatcgcgatggagcaaaagtagtgttaggtacagcgattacagaaaaacagtatgaaactcacgaaaatccgttagcctttttatgccaacaaggtttttcactagagaatgcattatatgcaatcgccgctgtgcgtaggtttactttaggttgcgtattggtggatcaagagcggcaagtcgctaaagaagaaagggaaacacctactactgatagtatgccgccattattacgacaagctagtgaattacaggatcaccaaggtgcagagccagccttcttattcggccttgaattgatcatatgcggattagaaaaacaacttaaatgtgaaagagggtcttaa

SEQ ID NO: 422 - DNA, 627 bp, Artificial Sequence
  synthetic construct; Sulfonylurea responsive repressor
atgggatctagattagataaaagtaaagtgattaacagcgcattagagctgcttaatgaggtcggaatcgaaggtttaacaacccgtaaactcgcccagaagctaggtgtagagcagcctacattgtattggcatgtaaaaaataagcgagctctgctcgacgccttagccattgagatgctggataggcacgcgactcacttttgccctttagaaggggaaagctggcaagattttttacgtaataacgctaaaagtatgagatgtgctttactaagtcatcgcgatggagcaaaagtatgtttaggtacaggctttacagaaaaacagtatgaaactgccgaaaatagtttagcctttttatgccaacaaggtttttcactagagaatgcattatatgcaatgcaggctgtgtgtatttttactttaggttgcgtattgttggatcaagagcttcaagtcgctaaagaagaaagggaaacacctactactgatagtatgccgccattattacgacaagctctggaattaaaggatcaccaaggtgcagagccagccttcttattcggccttgaattgatcatatgcggattagaaaaacaacttaaatgtgaaagtgggtcttaa

SEQ ID NO: 423 - DNA, 627 bp, Artificial Sequence
  synthetic construct; Sulfonylurea responsive repressor
atgggatctagattagataaaagtaaagtgattaacagcgcattagagctgcttaatgaggtcggaatcgaaggtttaacaacccgtaaactcgcccagaagctaggtgtagagcagcctacattgtattggcatgtaaaaaataagcgagctctgctcgacgccttagccattgagatgatggataggcaccagactcacttttgccctttagaaggggaaagctggcaagattttttacgtaataacgctaaaagtatgagatgtgctttactaagtcatcgcgatggagcaaaagtatttttaggtacagcgtggacagaaaaacagtatgaaactgtggaaaatctgttagcctttttatgccaacaaggtttttcactagagaatgcattatatgcactcaatgctgtggcgacgtttactttaggttgcgtattgtgggatcaagagaagcaagtcgctaaagaagaaagggaaacacctactactgatagtatgccgccattattacgacaagctcatgaattaggtgatcaccaaggtgcagagccagccttcttattcggccttgaattgatcatatgcggattagaaaaacaacttaaatctgaaagtgggtcttaa

SEQ ID NO: 424 - DNA, 627 bp, Artificial Sequence
  synthetic construct; Sulfonylurea responsive repressor
atgggatctagattagataaaagtaaagtgattaacagcgcattagagctgcttaatgaggtcggaatcgaaggtttaacaacccgtaaactcgcccagaagctaggtgtagagcagcctacattgtattggcatgtaaaaaataagcgagctctgctcgacgccttagccattgagatgatggataggcaccatactcacttttgccctttagaaggggaaagctggcaagattttttacgtaatactgctaaaagttatcgatgtgctttactaagtcatcgcgatggagcaaaagtatgtttaggtacagcgattacagaaaaacagtatgaaactaaggaaaataatttagcctttttatgccaacaaggtttttcactagagaatgcattatatgcacggcaggctgtgcgggtgtttactttaggttgcgtattgtttgatcaagagatgcaagtcgctaaagaagaaagggaaacacctactactgatagtatgccgccattattacgacaagcttcggaattactggatcaccaaggtgcagagccagccttcttattcggccttgaattgatcatatgcggattagaaaaacaacttaaatctgaaagtgggtcttaa

SEQ ID NO: 425 - DNA, 627 bp, Artificial Sequence
  synthetic construct; Sulfonylurea responsive repressor
atgggatctagattagataaaagtaaagtgattaacagcgcattagagctgcttaatgaggtcggaatcgaaggtttaacaacccgtaaactcgcccagaagctaggtgtagagcagcctacattgtattggcatgtaaaaaataagcgagctctgctcgacgccttagccattgagatgctggataggcacaatactcacttttgccctttagaaggggaaagctggcaagattttttacgtaattctgctaaaagtatgagatgtgctttactaagtcatcgcgatggagcaaaagtattgttaggtacagcggtgacagaaaaacagtatgaaactacggaaaattctttagcctttttatgccaacaaggtttttcactagagaatgcattatatgcaatccgcgctgtgcgtacgtttactttaggttgcgtattggtggatcaagagcggcaagtcgctaaagaagaaagggaaacacctactactgatagtatgccgccattattacgacaagctaaggaattattggatcaccaaggtgcagagccagccttcttattcggccttgaattgatcatatgcggattagaaaaacaacttaaatgtgaaagtgggtcttaa

SEQ ID NO: 426 - DNA, 627 bp, Artificial Sequence
  synthetic construct; Sulfonylurea responsive repressor
atgggatctagattagataaaagtaaagtgattaacagcgcattagagctgcttaatgaggtcggaatcgaaggtttaacaacccgtaaactcgcccagaagctaggtgtagagcagcctacattgtattggcatgtaaaaaataagcgagctctgctcgacgccttagccattgagatgctggataggcacgcgactcacttttgccctttagaaggggaaagctggcaagattttttacgtaataacgctaaaagtatgagatgtgctttactaagtcatcgcgatggagcaaaagtatggttaggtacagcgtggacagaaaaacagtatgaaactcccgaaaatgtgttagcctttttatgccaacaaggtttttcactagagaatgcattatatgcatcgcgcgctgtggtaacttttactttaggttgcgtattgactgatcaagagaagcaagtcgctaaagaagaaagggaaacacctactactgatagtatgccgccattattacgacaagcttgggaattacttgatcaccaaggtgcagagccagccttcttattcggccttgaattgatcatatgcggattagaaaaacaacttaaatgtgaaagtgggtcttaa

SEQ ID NO: 427 - DNA, 627 bp, Artificial Sequence
  synthetic construct; Sulfonylurea responsive repressor
atgggatctagattagataaaagtaaagtgattaacagcgcattagagctgcttaatgaggtcggaatcgaaggtttaacaacccgtaaactcgcccagaagctaggtgtagagcagcctacattgtattggcatgtaaaaaataagcgagctctgctcgacgccttagccattgagatgatggataggcaccagactcacttttgccctttagaaggggaaagctggcaagattttttacgtaatactgctaaaagtatgagatgtgctttactaagtcatcgcgatggagcaaaagtatggttaggtacacgctggacagaaaaacagtatgaaactcccgaaaatatgttagcctttttatgccaacaaggtttttcactagagaatgcattatatgcatggagcgctgtgtgtaattttactttaggttgcgtattgtcggatcaagagaggcaagtcgctaaagaagaaagggaaacacctactactgatagtatgccgccattattacgacaagcttgggaattatctgatcaccaaggtgcagagccagccttcttattcggccttgaattgatcatatgcggattagaaaaacaacttaaatgtgaaagtgggtcttaa

SEQ ID NO: 428 - DNA, 627 bp, Artificial Sequence
  synthetic construct; Sulfonylurea responsive repressor
atgggatctagattagataaaagtaaagtgattaacagcgcattagagctgcttaatgaggtcggaatcgaaggtttaacaacccgtaaactcgcccagaagctaggtgtagagcagcctacattgtattggcatgtaaaaaataagcgagctctgctcgacgccttagccattgagatgctggataggcacgcgactcacttttgccctttagaaggggaaagctggcaagattttttacgtaataacgctaaaagtatgagatgtgctttactaagtcatcgcgatggagcaaaagtaatgttaggtacacgcgctacagaaaaacagtatgaaactgtggaaaatcgtttagcctttttatgccaacaaggtttttcactagagaatgcattatatgcagtgcgcgctgtgcattggtttactttaggttgcgtattgattgatcaagagatgcaagtcgctaaagaagaaagggaaacacctactactgatagtatgccgccattattacgacaagcttatgaattatatgatcaccaaggtgcagagccagccttcttattcggccttgaattgatcatatgcggattagaaaaacaacttaaatgtgaaagtgggtcttaa

SEQ ID NO: 429 - DNA, 627 bp, Artificial Sequence
  synthetic construct; Sulfonylurea responsive repressor
atgggatctagattagataaaagtaaagtgattaacagcgcattagagctgcttaatgaggtcggaatcgaaggtttaacaacccgtaaactcgcccagaagctaggtgtagagcagcctacattgtattggcatgtaaaaaataagcgagctctgctcgacgccttagccattgagatggcggataggcaccatactcacttttgccctttagaaggggaaagctggcaagattttttacgtaataacgctaaaagtatgagatgtgctttactaagtcatcgcgatggagcaaaagtatggttaggtacagcgtggacagaaaaacagtatgaaactaccgaaaatatgttagcctttttatgccaacaaggtttttcactagagaatgcattatatgcatggcgcgctgtgacgatgtttactttaggttgcgtattgcgtgatcaagagtggcaagtcgctaaagaagaaagggaaacacctactactgatagtatgccgccattattacgacaagctttggaattaggtgatcaccaaggtgcagagccagccttcttattcggccttgaattgatcatatgcggattagaaaaacaacttaaatgtgaaagtgggtcttaa

SEQ ID NO: 430 - DNA, 627 bp, Artificial Sequence
  synthetic construct; Sulfonylurea responsive repressor
atgggatctagattagataaaagtaaagtgattaacagcgcattagagctgcttaatgaggtcggaatcgaaggtttaacaacccgtaaactcgcccagaagctaggtgtagagcagcctacattgtattggcatgtaaaaaataagcgagctctgctcgacgccttagccattgagatgctggataggcacgcgactcacttttgccctttagaaggggaaagctggcaagattttttacgtaataacgctaaaagttatagatgtgctttactaagtcatcgcgatggagcaaaagtatatttaggtacagcggtgacagaaaaacagtatgaaactgccgaaaatcagttagcctttttatgccaacaaggtttttcactagagaatgcattatatgcagtgaaggctgtggcggggtttactttaggttgcgtattgtgggatcaagagtctcaagtcgctaaagaagaaagggaaacacctactactgctagtatgccgccattattacgacaagctgtggaattagcggatcaccaaggtgcagagccagccttcttattcggccttgaattgatcatatgcggattagaaaaacaacttaaatgtgaaagtgggtcttaa

SEQ ID NO: 431 - DNA, 627 bp, Artificial Sequence
  synthetic construct; Sulfonylurea responsive repressor
atgggatctagattagataaaagtaaagtgattaacagcgcattagagctgcttaatgaggtcggaatcgaaggtttaacaacccgtaaactcgcccagaagctaggtgtagagcagcctacattgtattggcatgtaaaaaataagcgagctctgctcgacgccttagccattgagatgatggataggcacgcaactcacatttgccctttagaaggggaaagctggcaagattttttacgtaataatgctaaaagtatgagatgtgctttactaagccatcgcgatggagcaaaagtatgtttaggtacacgctggacagaacaacaatatgaagctgctgaaaatatgttagcctttttatgccaacaaggtttttcactagagaatgcattatatgcagtgagtgctgtgagggtgtttactttaggttgcgtattgtttgatcaagagagccaagtcgctaaagaagaaagggaaacacctactactgctagtatgccgccattattgcgacaagcttgggaattaaaggatcaccaaggtgcagagccagccttcttattcggccttgaattgatcatatgcggattagaaaaacaacttaaatgcgaaagtgggtcttaa

SEQ ID NO: 432 - DNA, 627 bp, Artificial Sequence
  synthetic construct; Sulfonylurea responsive repressor
  misc_feature (240)..(240): n is a, c, g, or t
  misc_feature (427)..(427): n is a, c, g, or t
atgggatctagattagataaaagtaaagtgattaacagcgcattagagctgcttaatgaggtcggaatcgaaggtttaacaacccgtaaactcgcccagaagctaggtgtagagcagcctacattgtattggcatgtaaaaaataagcgagctctgctcgacgccttagccattgagatgatggataggcaccaaactcactattgccctttagaaggggaaagctggcaagattttttncgtaataatgctaaaagtatgagatgtgctttactaagccatcgcgatggagcaaaagtatgtttaggtacacgctggacagaacaacaatatgaaagtgctgaaaatatgttagcctttttatgccaacaaggtttttcactagagaatgcattatatgcaatgagtgctgtgagggtgtttactntaggttgcgtattgtttgatcaagagagccaagtcgctaaagaagaaagggaaacacctactactgctagtatgccgccattattgcgacaagcttgggaattaaaggatcaccaaggtgcagagccagccttcttattcggccttgaattgatcatatgcggattagaaaaacaacttaaatgcgaaagtgggtcttaa

SEQ ID NO: 433 - DNA, 627 bp, Artificial Sequence
  synthetic construct; Sulfonylurea responsive repressor
atgggatctagattagataaaagtaaagtgattaacagcgcattagagctgcttaatgaggtcggaatcgaaggtttaacaacccgtaaactcgcccagaagctaggtgtagagcagcctacattgtattggcatgtaaaaaataagcgagctctgctcgacgccttagccattgagatgatggataggcaccaaactcacttttgccctttagaaggggaaagctggcaagattttttacgtaataatgctaaaagtatgagatgtgctttactaagccatcgcgatggagcaaaagtatgtttaggtacacgctggacagaaaaacaatatgaaactgctgaaaatatgttagcctttttatgccaacaaggtttttcactagagaatgcattatatgcaatgagtgctgtgagggtgtttactttaggttgcgtattgtttgatcaagagctccaagtcgctaaagaagaaagggaaacacctactactgctagtatgccgccattagtgcgacaagtttgggaattaaaggatcaccaaggtgcagagccagccttcttattcggccttgaattgatcatatgcggattagaaaaacaacttaaatgcgaaagtgggtcttaa

SEQ ID NO: 434 - DNA, 627 bp, Artificial Sequence
  synthetic construct; Sulfonylurea responsive repressor
atgggatctagattagataaaagtaaagtgattaacagcgcattagagctgcttaatgaggtcggaatcgaaggtttaacaacccgtaaactcgcccagaagctaggtgtagagcagcctacattgtattggcatgtaaaaaataagcgagctctgctcgacgccttagccattgagatgatggataggcacgcaactcactattgccctttagaaggggaaagctggcaagattttttacgtaataatgctaaaagtatgagatgtgctttactaagccatcgcgatggagcaaaagtatgtttaggtacacgctggacagaaaaacattatgaaactgctgaaaatatgttagcctttttatgccaacaaggtttttcactagagaatgcattatatgcagtgagtgctgtgagggtgtttactttaggttgcgtattgtttgatcaagagagccaagtcgctaaagaagaaagggaaacacctactactgctagtatgccgccattattgcgacaagcttgggaattaaaggatcaccaaggtgcagagccagccttcttattcggccttgaattgatcatatgcggattagaaaaacaacttaaatgcgaaagtgggtcttaa

SEQ ID NO: 435 - DNA, 627 bp, Artificial Sequence
  synthetic construct; Sulfonylurea responsive repressor
atgggatctagattagataaaagtaaagtgattaacagcgcattagagctgcttaatgaggtcggaatcgaaggtttaacaacccgtaaactcgcccagaagctaggtgtagagcagcctacattgtattggcatgtaaaaaataagcgagctctgctcgacgccttagccattgagatgatggataggcacgcaactcactattgccctttagaaggggaaagctggcaagattttttacgtaatactgctaaaagtatgagatgtgctttactaagccatcgcgatggagcaaaagtatgtttaggtacacgctggacagaacaacaatatgaaagtgctgaaaatatgttagcctttttatgccaacaaggtttttcactagagaatgcattatatgcagtgagtgctgtgagggtgtttactttaggttgcgtattgtttgatcaagagagccaagtcgctaaagaagaaagggaaacacctactactgctagtatgccgccattagtgcgacaaggttgggaattaaaggatcaccaaggtgcagagccagccttcttattcggccttgaattgatcatatgcggattagaaaaacaacttaaatgcgaaagtgggtcttaa

SEQ ID NO: 436 - DNA, 627 bp, Artificial Sequence
  synthetic construct; Sulfonylurea responsive repressor
atgggatctagattagataaaagtaaagtgattaacagcgcattagagctgcttaatgaggtcggaatcgaaggtttaacaacccgtaaactcgcccagaagctaggtgtagagcagcctacattgtattggcatgtaaaaaataagcgagctctgctcgacgccttagccattgagatgatggataggcaccaaactcactattgccctttagaaggggaaagctggcaagattttttacgtaataatgctaaaagtatgagatgtgctttactaagccatcgcgatggagcaaaagtatgtttaggtacacgctggacagaacaattgtatgaaactgctgaaaatatgttagcctttttatgccaacaaggtttttcactagagaatgcattatatgcagtgagtgctgtgagggtgtttactttaggttgcgtattgtttgatcaagagctccaagtcgctaaagaagaaagggaaacccctactactgctagtatgccgccattattgcgacaagcttgggaattaaaggatcaccaaggtgcagagccagccttcttattcggccttgaattgatcatatgcggattagaaaaacaacttaaatgcgaaagtgggtcttaa

SEQ ID NO: 437 - DNA, 627 bp, Artificial Sequence
  synthetic construct; Sulfonylurea responsive repressor
atgggatctagattagataaaagtaaagtgattaacagcgcattagagctgcttaatgaggtcggaatcgaaggtttaacaacccgtaaactcgcccagaagctaggtgtagagcagcctacattgtattggcatgtaaaaaataagcgagctctgctcgacgccttagccattgagatgatggataggcacgcaactcactattgccctttagaaggggaaagctggcaagattttttacgtaataatgctaaaagtatgagatgtgctttactaagccatcgcgatggagcaaaagtatgtttaggtacacgctggacagaacaacaatatgaaactgctgaaaatatgttagcctttttatgccaacaaggtttttcactagagaatgcattatatgcaatgagtgctgtgagggtgtttactttaggttgcgtattgtttgatcaagagagccaagtcgctaaagaagaaagggaaacacctactactgctagtatgccgccattattgcgacaagtttgggaattaaaggatcaccaaggtgcagagccagccttcttattcggccttgaattgatcatatgcggattagaaaaacaacttaaatgcgaaagtgggtcttaa

SEQ ID NO: 438 - DNA, 627 bp, Artificial Sequence
  synthetic construct; Sulfonylurea responsive repressor
atgggatctagattagataaaagtaaagtgattaacagcgcattagagctgcttaatgaggtcggaatcgaaggtttaacaacccgtaaactcgcccagaagctaggtgtagagcagcctacattgtattggcatgtaaaaaataagcgagctctgctcgacgccttagccattgagatgatggataggcaccaaactcacgtttgccctttagaaggggaaagctggcaagattttttacgtaataatgctaaaagtatgagatgtgctttactaagccatcgcgatggagcaaaagtatgtttaggtacacgctggacagaacaattgtatgaaactgctgaaaatcaattagcctttttatgccaacaaggtttttcactagagaatgcattatatgcaatgagtgctgtgagggtgtttactttaggttgcgtattgtttgatcaagagctccaagtcgctaaagaagaaagggaaacacctactactgctagtatgccaccattattgcgacaagtttgggaattaaaggatcaccaaggtgcagagccagccttcttattcggccttgaattgatcatatgcggattagaaaaacaacttaaatgcgaaagtgggtcttaa

SEQ ID NO: 439 - DNA, 627 bp, Artificial Sequence
  synthetic construct; Sulfonylurea responsive repressor
atgggatctagattagataaaagtaaagtgattaacagcgcattagagctgcttaatgaggtcggaatcgaaggtttaacaacccgtaaactcgcccagaagctaggtgtagagcagcctacattgtattggcatgtaaaaaataagcgagctctgctcgacgccttagccattgagatgatggataggcaccaaactcacatttgccctttagaaggggaaagctggcaagattttttacgtaatactgctaaaagtatgagatgtgctttactaagccatcgcgatggagcaaaagtatgtttaggtacacgctggacagaacaacattatgaaactgctgaaaatcaattagcctttttatgccaacaaggtttttcactagagaatgcattatatgcaatgagtgctgtgagggtgtttactttaggttgcgtattgtttgatcaagagagccaagtcgctaaagaagaaagggaaacacctactactgctagtatgccgccattagtgcgacaagcttgggaattaaaggatcaccaaggtgcagagccagccttcttattcggccttgaattgatcatatgcggattagaaaaacaacttaaatgcgaaagtgggtcttaa

SEQ ID NO: 440 - DNA, 627 bp, Artificial Sequence
  synthetic construct; Sulfonylurea responsive repressor
atgggatctagattagataaaagtaaagtgattaacagcgcattagagctgcttaatgaggtcggaatcgaaggtttaacaacccgtaaactcgcccagaagctaggtgtagagcagcctacattgtattggcatgtaaaaaataagcgagctctgctcgacgccttagccattgagatgatggataggcaccaaactcacgtgtgccctttagaaggggaaagctggcaagattttttacgtaataatgctaaaagtatgagatgtgctttactaagccatcgcgatggagcaaaagtatgtttaggtacacgctggacagaaaaacaatatgaagctgctgaaaatatgttagcctttttatgccaacaaggtttttcactagagaatgcattatatgcagtgagtgctgtgagggtgtttactttaggttgcgtattgtttgatcaagagagccaagtcgctaaagaagaaagggaaacacctactactgctagtatgccgccattattgcgacaaggttgggaattaaaggatcaccaaggtgcagagccagccttcttattcggccttgaattgatcatatgcggattagaaaaacaacttaaatgcgaaagtgggtcttaa

SEQ ID NO: 441 - DNA, 627 bp, Artificial Sequence
  synthetic construct; Sulfonylurea responsive repressor
atgggatctagattagataaaagtaaagtgattaacagcgcattagagctgcttaatgaggtcggaatcgaaggtttaacaacccgtaaactcgcccagaagctaggtgtagagcagcctacattgtattggcatgtaaaaaataagcgagctctgctcgacgccttagccattgagatgatggataggcaccaaactcactattgccctttagaaggggaaagctggcaagattttttacgtaatactgctaaaagtatgagatgtgctttactaagccatcgcgatggagcaaaagtatgtttaggtacacgctggacagaacaacattatgaaactgctgaaaatatgttagcctttttatgccaacaaggtttttcactagagaatgcattatatgcaatgagtgctgtgagggtgtttactttaggttgcgtattgtttgatcaagagctccaagtcgctaaagaagaaagggaaacacctactactgctagtatgccgccattagtgcgacaagtttgggaattaaaggatcaccaaggtgcagagccagccttcttattcggccttgaattgatcatatgcggattagaaaaacaacttaaatgcgaaagtgggtcttaa

SEQ ID NO: 442 - DNA, 627 bp, Artificial Sequence
  synthetic construct; Sulfonylurea responsive repressor
atgggatctagattagataaaagtaaagtgattaacagcgcattagagctgcttaatgaggtcggaatcgaaggtttaacaacccgtaaactcgcccagaagctaggtgtagagcagcctacattgtattggcatgtaaaaaataagcgagctctgctcgacgccttagccattgagatgatggataggcaccaaactcacgtgtgccctttagaaggggaaagctggcaagattttttacgtaataatgctaaaagtatgagatgtgctttactaagccatcgcgatggagcaaaagtatgtttaggtacacgctggacagaacaattgtatgaaactgctgaaaatcaattagcctttttatgccaacaaggtttttcactagagaatgcattatatgcaatgagtgctgtgaggaactttactttaggttgcgtattgtttgatcaagagagccaagtcgctaaagaagaaagggaaacacctactactgctagtatgccgccattagtgcgacaagcttgggaattaaaggatcaccaaggtgcagagccagccttcttattcggccttgaattgatcatatgcggattagaaaaacaacttaaatgcgaaagtgggtcttaa

SEQ ID NO: 443 - DNA, 627 bp, Artificial Sequence
  synthetic construct; Sulfonylurea responsive repressor
atgggatctagattagataaaagtaaagtgattaacagcgcattagagctgcttaatgaggtcggaatcgaaggtttaacaacccgtaaactcgcccagaagctaggtgtagagcagcctacattgtattggcatgtaaaaaataagcgagctctgctcgacgccttagccattgagatgatggataggcaccaaactcactattgccctttagaaggggaaagctggcaagattttttacgtaataatgctaaaagtatgagatgtgctttactaagccatcgcgatggagcaaaagtatgtttaggtacacgctggacagaacaattgtatgaaactgctgaaaatatgttagcctttttatgccaacaaggtttttcactagagaatgcattatatgcagtgagtgctgtgagggtgtttactttaggttgcgtattgtttgatcaagagagccaagtcgctaaagaagaaagggaaacacctactactgctagtatgccgccattagtgcgacaagtttgggaattaaaggatcaccaaggtgcagagccagccttcttattcggccttgaattgatcatatgcggattagaaaaacaacttaaatgcgaaagtgggtcttaa

SEQ ID NO: 444 - DNA, 627 bp, Artificial Sequence
  synthetic construct; Sulfonylurea responsive repressor
atgggatctagattagataaaagtaaagtgattaacagcgcattagagctgcttaatgaggtcggaatcgaaggtttaacaacccgtaaactcgcccagaagctaggtgtagagcagcctacattgtattggcatgtaaaaaataagcgagctctgctcgacgccttagccattgagatgatggataggcacgcaactcacgtttgccctttagaaggggaaagctggcaagattttttacgtaataatgctaaaagtatgagatgtgctttactaagccatcgcgatggagcaaaagtatgtttaggtacacgctggacagaacaaatgtatgaaactgctgaaaatcaattagcctttttatgccaacaaggtttttcactagagaatgcattatatgcaatgagtgctgtgagggtgtttactttaggttgcgtattgtttgatcaagagagccaagtcgctaaagaagaaagggaaacacctactactgctagtatgccgccattagtgcgacaagcttgggaattaaaggatcaccaaggtgcagagccagccttcttattcggccttgaattgatcatatgcggattagaaaaacaacttaaatgcgaaagtgggtcttaa

SEQ ID NO: 445 - DNA, 626 bp, Artificial Sequence
  synthetic construct; Sulfonylurea responsive repressor
atgggatctagattagataaaagtaaagtgattaacagcgcattagagctgcttaatgaggtcggaatcgaaggtttaacaacccgtaaactcgcccagaagctaggtgtagagcagcctacattgtattggcatgtaaaaaataagcgagctctgctcgacgccttagccattgagatgatggataggcaccaaactcacgtgtgccctttagaaggggaaagctggcaagattttttacgtaataatgctaaaagtatgagatgtgctttactaagccatcgcgatggagcaaaagtatgtttaggtacacgctggacagaaaaacaatatgaaagtgctgaaaatatgttagcctttttatgccaacaaggtttttcactagagaatgcattatatgcagtgagtgctgtgagggtgtttactttaggttgcgtattgtttgatcaagagctccaagtcgctaaagaagaaagggaaacacctactactgctagtatgccgccattattgcgacaaggttgggaattaaatgatcaccaaggtgcagagccagccttcttattcggccttgaattgatcatatgcggattagaaaaacaacttaaatgcgaaagtgggtctaa

SEQ ID NO: 446 - DNA, 627 bp, Artificial Sequence
  synthetic construct; Sulfonylurea responsive repressor
atgggatctagattagataaaagtaaagtgattaacagcgcattagagctgcttaatgaggtcggaatcgaaggtttaacaacccgtaaactcgcccagaagctaggtgtagagcagcctacattgtattggcatgtaaaaaataagcgagctctgctcgacgccttagccattgagatgatggataggcaccaaactcactattgccctttagaaggggaaagctggcaagattttttacgtaataatgctaaaagtatgagatgtgctttactaagccatcgcgatggagcaaaagtatgtttaggtacacgctggacagaacaacattatgaaggtgctgaaaatatgttagcctttttatgccaacaaggtttttcactagagaatgcattatatgcaatgagtgctgtgagggtgtttactttaggttgcgtattgtttgatcaagagctccaagtcgctaaagaagaaagggaaacacctactactgctagtatgccgccattagtgcgacaagtttgggaattaaaggatcaccaaggtgcagagccagccttcttattcggccttgaattgatcatatgcggattagaaaaacaacttaaatgcgaaagtgggtcttaa

SEQ ID NO: 447 - DNA, 627 bp, Artificial Sequence
  synthetic construct; Sulfonylurea responsive repressor
  misc_feature (455)..(455): n is a, c, g, or t
atgggatctagattagataaaagtaaagtgattaacagcgcattagagctgcttaatgaggtcggaatcgaaggtttaacaacccgtaaactcgcccagaagctaggtgtagagcagcctacattgtattggcatgtaaaaaataagcgagctctgctcgacgccttagccattgagatgatggataggcacgcaactcacgtttgccctttagaaggggaaagctggcaagattttttacgtaataatgctaaaagtatgagatgtgctttactaagccatcgcgatggagcaaaagtatgtttaggtacacgctggacagaacaaatgtatgaaactgctgaaaatcaattagcctttttatgccaacaaggtttttcactagagaatgcattatatgcaatgagtgctgtgagggtgtttactttaggttgcgtattgtttgatcaagaganccaagtcgctaaagaagaaagggaaacacctactactgctagtatgccgccattattgcgacaagtttgggaattaaaggatcaccaaggtgcagagccagccttcttattcggccttgaattgatcatatgcggattagaaaaacaacttaaatgcgaaagtgggtcttaa

SEQ ID NO: 448 - DNA, 627 bp, Artificial Sequence
  synthetic construct; Sulfonylurea responsive repressor
atgggatctagattagataaaagtaaagtgattaacagcgcattagagctgcttaatgaggtcggaatcgaaggtttaacaacccgtaaactcgcccagaagctaggtgtagagcagcctacattgtattggcatgtaaaaaataagcgagctctgctcgacgccttagccattgagatgatggataggcacgcaactcactattgccctttagaaggggaaagctggcaagattttttacgtaatactgctaaaagtatgagatgtgctttactaagccatcgcgatggagcaaaagtatgtttaggtacacgctggacagaaaaacaatatgaaactgctgaaaatcaattagcctttttatgccaacaaggtttttcactagagaatgcattatatgcaatgagtgctgtgagggtgtttactttaggttgcgtattgtttgatcaagagctccaagtcgctaaagaagaaagggaaacacctactactgctagtatgccgccattagtgcgacaagtttgggaattaaaggatcaccaaggtgcagagccagccttcttattcggccttgaattgatcatatgcggattagaaaaacaacttaaatgcgaaagtgggtcttaa

SEQ ID NO: 449 - DNA, 627 bp, Artificial Sequence
  synthetic construct; Sulfonylurea responsive repressor
  misc_feature (193)..(193): n is a, c, g, or t
atgggatctagattagataaaagtaaagtgattaacagcgcattagagctgcttaatgaggtcggaatcgaaggtttaacaacccgtaaactcgcccagaagctaggtgtagagcagcctacattgtattggcatgtaaaaaataagcgagctctgctcgacgccttagccattgagatgatggataggcacncaactcactattgccctttagaaggggaaagctggcaagattttttacgtaatactgctaaaagtatgagatgtgctttactaagccatcgcgatggagcaaaagtatgtttaggtacacgctggacagaaaaacaatatgaaactgctgaaaatcaattagcctttttatgccaacaaggtttttcactagagaatgcattatatgcaatgagtgctgtgagggtgtttactttaggttgcgtattgtttgatcaagagagccaagtcgctaaagaagaaagggaaacacctactactgctagtatgccgccattagtgcgacaaggttgggaattaaaggatcaccaaggtgcagagccagccttcttattcggccttgaattgatcatatgcggattagaaaaacaacttaaatgcgaaagtgggtcttaa

SEQ ID NO: 450 - DNA, 627 bp, Artificial Sequence
  synthetic construct; Sulfonylurea responsive repressor
atgggatctagattagataaaagtaaagtgattaacagcgcattagagctgcttaatgaggtcggaatcgaaggtttaacaacccgtaaactcgcccagaagctaggtgtagagcagcctacattgtattggcatgtaaaaaataagcgagctctgctcgacgccttagccattgagatgatggataggcaccaaactcacatgtgccctttagaaggggaaagctggcaagattttttacgtaataatgctaaaagtatgagatgtgctttactaagccatcgcgatggagcaaaagtatgtttaggtacacgctggacagaaaaacattatgaaactgctgaaaatatgttagcctttttatgccaacaaggtttttcactagagaatgcattatatgcagtgagtgctgtgagggtgtttactttaggttgcgtattgtttgatcaagagagccaagtcgctaaagaagaaagggaaacacctactactgctagtatgccgccattagtgcgacaaggttgggaattaaaggatcaccaaggtgcagagccagccttcttattcggccttgaattgatcatatgcggattagaaaaacaacttaaatgcgaaagtgggtcttaa

SEQ ID NO: 451 - DNA, 627 bp, Artificial Sequence
  synthetic construct; Sulfonylurea responsive repressor
atgggatctagattagataaaagtaaagtgattaacagcgcattagagctgcttaatgaggtcggaatcgaaggtttaacaacccgtaaactcgcccagaagctaggtgtagagcagcctacattgtattggcatgtaaaaaataagcgagctctgctcgacgccttagccattgagatgatggataggcaccaaactcacttgtgccctttagaaggggaaagctggcaagattttttacgtaataatgctaaaagtatgagatgtgctttactaagccatcgcgatggagcaaaagtatgtttaggtacacgctggacagaaaaacaatatgaaagtgctgaaaatatgttagcctttttatgccaacaaggtttttcactagagaatgcattatatgcaatgagtgctgtgagggtgtttactttaggttgcgtattgtttgatcaagagagccaagtcgctaaagaagaaagggaaacacctactactgctagtatgccgccattagtgcgacaagtttgggaattaaaggatcaccaaggtgcagagccagccttcttattcggccttgaattgatcatatgcggattagaaaaacaacttaaatgcgaaagtgggtcttaa

SEQ ID NO: 452 - DNA, 627 bp, Artificial Sequence
  synthetic construct; Sulfonylurea responsive repressor
atgggatctagattagataaaagtaaagtgattaacagcgcattagagctgcttaatgaggtcggaatcgaaggtttaacaacccgtaaactcgcccagaagctaggtgtagagcagcctacattgtattggcatgtaaaaaataagcgagctctgctcgacgccttagccattgagatgatggataggcaccaaactcactattgccctttagaaggggaaagctggcaagattttttacgtaatactgctaaaagtatgagatgtgctttactaagccatcgcgatggagcaaaagtatgtttaggtacacgctggacagaaaaacattatgaaactgctgaaaatcaattagcctttttatgccaacaaggtttttcactagagaatgcattatatgcagtgagtgctgtgagggtgtttactttaggttgcgtattgtttgatcaagagagccaagtcgctaaagaagaaagggaaacacctactactgctagtatgccgccattagtgcgacaagtttgggaattaaaggatcaccaaggtgcagagccagccttcttattcggccttgaattgatcatatgcggattagaaaaacaacttaaatgcgaaagtgggtcttaa

SEQ ID NO: 453 - DNA, 627 bp, Artificial Sequence
  synthetic construct; Sulfonylurea responsive repressor
atgggatctagattagataaaagtaaagtgattaacagcgcattagagctgcttaatgaggtcggaatcgaaggtttaacaacccgtaaactcgcccagaagctaggtgtagagcagcctacattgtattggcatgtaaaaaataagcgagctctgctcgacgccttagccattgagatgatggataggcaccaaactcactattgccctttagaaggggaaagctggcaagattttttacgtaatactgctaaaagtatgagatgtgctttactaagccatcgcgatggagcaaaagtatgtttaggtacacgctggacagaacaattgtatgaaactgctgaaaatcaattagcctttttatgccaacaaggtttttcactagagaatgcattatatgcaatgagtgctgtgagggtgtttactttaggttgcgtattgtttgatcaagagctccaagtcgctaaagaagaaagggaaacacctactactgctagtatgccgccattattgcgacaagcttgggaattaaaggatcaccaaggtgcagagccagccttcttattcggccttgaattgatcatatgcggattagaaaaacaacttaaatgcgaaagtgggtcttaa

SEQ ID NO: 454 - DNA, 627 bp, Artificial Sequence
  synthetic construct; Sulfonylurea responsive repressor
  misc_feature (204)..(204): n is a, c, g, or t
  misc_feature (337)..(337): n is a, c, g, or t
atgggatctagattagataaaagtaaagtgattaacagcgcattagagctgcttaatgaggtcggaatcgaaggtttaacaacccgtaaactcgcccagaagctaggtgtagagcagcctacattgtattggcatgtaaaaaataagcgagctctgctcgacgccttagccattgagatgatggataggcaccaaactcactantgccctttagaaggggaaagctggcaagattttttacgtaatactgctaaaagtatgagatgtgctttactaagccatcgcgatggagcaaaagtatgtttaggtacacgctggacagaacaacaatatgaanctgctgaaaatctgttagcctttttatgccaacaaggtttttcactagagaatgcattatatgcaatgagtgctgtgagggtgtttactttaggttgcgtattgtttgatcaagagatccaagtcgctaaagaagaaagggaaacacctactactgctagtatgccgccattattgcgacaagttttggaattaaaggatcaccaaggtgcagagccagccttcttattcggccttgaattgatcatatgcggattagaaaaacaacttaaatgcgaaagtgggtcttaa

SEQ ID NO: 455 - DNA, 627 bp, Artificial Sequence
  synthetic construct; Sulfonylurea responsive repressor
atgggatctagattagataaaagtaaagtgattaacagcgcattagagctgcttaatgaggtcggaatcgaaggtttaacaacccgtaaactcgcccagaagctaggtgtagagcagcctacattgtattggcatgtaaaaaataagcgagctctgctcgacgccttagccattgagatgatggataggcaccaaactcactattgccctttagaaggggaaagctggcaagattttttacgtaatactgctaaaagtatgagatgtgctttactaagccatcgcgatggagcaaaagtatgtttaggtacacgctggacagaaaaacattatgaaactgctgaaaatatgttagcctttttatgccaacaaggtttttcactagagaatgcattatatgcagtgagtgctgtgagggtgtttactttaggttgcgtattgtttgatcaagagagccaagtcgctaaagaagaaagggaaacacctactactgctagtatgccgccattattgcgacaagtttgggaattaaaggatcaccaaggtgcagagccagccttcttattcggccttgaattgatcatatgcggattagaaaaacaacttaaatgcgaaagtgggtcttaa

SEQ ID NO: 456 - DNA, 627 bp, Artificial Sequence
  synthetic construct; Sulfonylurea responsive repressor
atgggatctagattagataaaagtaaagtgattaacagcgcattagagctgcttaatgaggtcggaatcgaaggtttaacaacccgtaaactcgcccagaagctaggtgtagagcagcctacattgtattggcatgtaaaaaataagcgagctctgctcgacgccttagccattgagatgatggataggcaccaaactcacgtttgccctttagaaggggaaagctggcaagattttttacgtaataatgctaaaagtatgagatgtgctttactaagccatcgcgatggagcaaaagtatgtttaggtacacgctggacagaacaattgtatgaaactgctgaaaatatgttagcctttttatgccaacaaggtttttcactagagaatgcattatatgcaatgagtgctgtgagggtgtttactttaggttgcgtattgtttgatcaagagagccaagtcgctaaagaagaaagggaaacacctactactgctagtatgccgccattagtgcgacaaggttgggaattaaaggatcaccaaggtgcagagccagccttcttattcggccttgaattgatcatatgcggattagaaaaacaacttaaatgcgaaagtgggtcttaa

SEQ ID NO: 457 - DNA, 627 bp, Artificial Sequence
  synthetic construct; Sulfonylurea responsive repressor
  misc_feature (328)..(328): n is a, c, g, or t
atgggatctagattagataaaagtaaagtgattaacagcgcattagagctgcttaatgaggtcggaatcgaaggtttaacaacccgtaaactcgcccagaagctaggtgtagagcagcctacattgtattggcatgtaaaaaataagcgagctctgctcgacgccttagccattgagatgatggataggcacgcaactcacttgtgccctttagaaggggaaagctggcaagattttttacgtaataatgctaaaagtatgagatgtgctttactaagccatcgcgatggagcaaaagtatgtttaggtacacgctggacagaaaaantgtatgaaagtgctgaaaatcaattagcctttttatgccaacaaggtttttcactagagaatgcattatatgcaatgagtgctgtgagggtgtttactttaggttgcgtattgtttgatcaagagctccaagtcgctaaagaagaaagggaaacacctactactgctagtatgccgccattattgcgacaagcttgggaattaaaggatcaccaaggtgcagagccagccttcttattcggccttgaattgatcatatgcggattagaaaaacaacttaaatgcgaaagtgggtcttaa

SEQ ID NO: 458 - DNA, 627 bp, Artificial Sequence
  synthetic construct; Sulfonylurea responsive repressor
atgggatctagattagataaaagtaaagtgattaacagcgcattagagctgcttaatgaggtcggaatcgaaggtttaacaacccgtaaactcgcccagaagctaggtgtagagcagcctacattgtattggcatgtaaaaaataagcgagctctgctcgacgccttagccattgagatgatggataggcaccaaactcactattgccctttagaaggggaaagctggcaagattttttacgtaatactgctaaaagtatgagatgtgctttactaagccatcgcgatggagcaaaagtatgtttaggtacacgctggacagaacaacaatatgaaactgctgaaaatatgttagcctttttatgccaacaaggtttttcactagagaatgcattatatgcagtgagtgctgtgaggaactttactttaggttgcgtattgtttgatcaagagagccaagtcgctaaagaagaaagggaaacacctactactgctagtatgccgccattagtgcgacaagcttgggaattaaaggatcaccaaggtgcagagccagccttcttattcggccttgaattgatcatatgcggattagaaaaacaacttaaatgcgaaagtgggtcttaa

SEQ ID NO: 459 - DNA, 627 bp, Artificial Sequence
  synthetic construct; Sulfonylurea responsive repressor
atgggatctagattagataaaagtaaagtgattaacagcgcattagagctgcttaatgaggtcggaatcgaaggtttaacaacccgtaaactcgcccagaagctaggtgtagagcagcctacattgtattggcatgtaaaaaataagcgagctctgctcgacgccttagccattgagatgatggataggcaccaaactcacttttgccctttagaaggggaaagctggcaagattttttacgtaataatgctaaaagtatgagatgtgctttactaagccatcgcgatggagcaaaagtatggttaggtacacgctggacagaacaaatgtatgaaactgctgaaaatatgttagcctttttatgccaacaaggtttttcactagagaatgcattatatgcagtgagtgctgtgaggaactttactttaggttgcgtattgtttgatcaagagagccaagtcgctaaagaagaaagggaaacacctactactgctagtatgccgccattattgcgacaaggttgggaattaaaggatcaccaaggtgcagagccagccttcttattcggccttgaattgatcatatgcggattagaaaaacaacttaaatgcgaaagtgggtcttaa

SEQ ID NO: 460 - DNA, 627 bp, Artificial Sequence
  synthetic construct; Sulfonylurea responsive repressor
atgggatctagattagataaaagtaaagtgattaacagcgcattagagctgcttaatgaggtcggaatcgaaggtttaacaacccgtaaactcgcccagaagctaggtgtagagcagcctacattgtattggcatgtaaaaaataagcgagctctgctcgacgccttagccattgagatgatggataggcaccaaactcacttttgccctttagaaggggaaagctggcaagattttttacgtaatactgctaaaagtatgagatgtgctttactaagccatcgcgatggagcaaaagtatgtttaggtacacgctggacagaacaacaatatgaaactgctgaaaatatgttagcctttttatgccaacaaggtttttcactagagaatgcattatatgcaatgagtgctgtgagggtgtttactttaggttgcgtattgtttgatcaagagagccaagtcgctaaagaagaaagggaaacacctactactgctagtatgccgccattagtgcgacaagcttgggaattaaaggatcaccaaggtgcagagccagccttcttattcggccttgaattgatcatatgcggattagaaaaacaacttaaatgcgaaagtgggtcttaa

SEQ ID NO: 461 - DNA, 627 bp, Artificial Sequence
  synthetic construct; Sulfonylurea responsive repressor
atgggatctagattagataaaagtaaagtgattaacagcgcattagagctgcttaatgaggtcggaatcgaaggtttaacaacccgtaaactcgcccagaagctaggtgtagagcagcctacattgtattggcatgtaaaaaataagcgagctctgctcgacgccttagccattgagatgatggataggcaccaaactcactattgccctttagaaggggaaagctggcaagattttttacgtaatactgctaaaagtatgagatgtgctttactaagccatcgcgatggagcaaaagtatgtttaggtacacgctggacagaacaacaatatgaaagtgctgaaaatcaattagcctttttatgccaacaaggtttttcactagagaatgcattatatgcagtgagtgctgtgagggtgtttactttaggttgcgtattgtttgatcaagagagccaagtcgctaaagaagaaagggaaacacctactactgctagtatgccgccattattgcgacaagcttgggaattaaaggatcaccaaggtgcagagccagccttcttattcggccttgaattgatcatatgcggattagaaaaacaacttaaatgcgaaagtgggtcttaa

SEQ ID NO: 462 - DNA, 627 bp, Artificial Sequence
  synthetic construct; Sulfonylurea responsive repressor
atgggatctagattagataaaagtaaagtgattaacagcgcattagagctgcttaatgaggtcggaatcgaaggtttaacaacccgtaaactcgcccagaagctaggtgtagagcagcctacattgtattggcatgtaaaaaataagcgagctctgctcgacgccttagccattgagatgatggataggcaccaaactcacatgtgccctttagaaggggaaagctggcaagattttttacgtaataatgctaaaagtatgagatgtgctttactaagccatcgcgatggagcaaaagtatgtttaggtacacgctggacagaaaaaatgtatgaagctgctgaaaatatgttagcctttttatgccaacaaggtttttcactagagaatgcattatatgcagtgagtgctgtgagggtgtttactttaggttgcgtattgtttgatcaagagctccaagtcgctaaagaagaaagggaaacacctactactgctagtatgccgccattattgcgacaagcttgggaattaaaggatcaccaaggtgcagagccagccttcttattcggccttgaattgatcatatgcggattagaaaaacaacttaaatgcgaaagtgggtcttaa

SEQ ID NO: 463 - DNA, 627 bp, Artificial Sequence
  synthetic construct; Sulfonylurea responsive repressor
atgggatctagattagataaaagtaaagtgattaacagcgcattagagctgcttaatgaggtcggaatcgaaggtttaacaacccgtaaactcgcccagaagctaggtgtagagcagcctacattgtattggcatgtaaaaaataagcgagctctgctcgacgccttagccattgagatgatggataggcacgcaactcactattgccctttagaaggggaaagctggcaagattttatacgtaatactgctaaaagtatgagatgtgctttactaagccatcgcgatggagcaaaagtatgtttaggtacacgctggacagaaaaacattatgaaactgctgaaaatatgttagcctttttatgccaacaaggtttttcactagagaatgcattatatgcagtgagtgctgtggggaactttactttaggttgcgtattgtttgatcaagagagccaagtcgctaaagaagaaagggaaacacctactactgctagtatgccgccattattgcgacaagtttgggaattaaaggatcaccaaggtgcagagccagccttcttattcggccttgaattgatcatatgcggattagaaaaacaacttaaatgcgaaagtgggtcttaa

SEQ ID NO: 464 - DNA, 627 bp, Artificial Sequence
  synthetic construct; Sulfonylurea responsive repressor
atgggatctagattagataaaagtaaagtgattaacagcgcattagagctgcttaatgaggtcggaatcgaaggtttaacaacccgtaaactcgcccagaagctaggtgtagagcagcctacattgtattggcatgtaaaaaataagcgagctctgctcgacgccttagccattgagatgatggataggcacgcaactcacttgtgccctttagaaggggaaagctggcaagattttttacgtaatactgctaaaagtatgagatgtgctttactaagccatcgcgatggagcaaaagtatgtttaggtacacgctggacagaaaaacaatatgaaagtgctgaaaatcaattagcctttttatgccaacaaggtttttcactagagaatgcattatatgcaatgagtgctgtgagggtgtttactttaggttgcgtattgtttgatcaagagagccaagtcgctaaagaagaaagggaaacacctactactgctagtatgccgccattattgcgacaagtttgggaattaaaggatcaccaaggtgcagagccagccttcttattcggccttgaattgatcatatgcggattagaaaaacaacttaaatgcgaaagtgggtcttaa

SEQ ID NO: 465 - DNA, 627 bp, Artificial Sequence
  synthetic construct; Sulfonylurea responsive repressor
atgggatctagattagataaaagtaaagtgattaacagcgcattagagctgcttaatgaggtcggaatcgaaggtttaacaacccgtaaactcgcccagaagctaggtgtagagcagcctacattgtattggcatgtaaaaaataagcgagctctgctcgacgccttagccattgagatgatggataggcaccaaactcactattgccctttagaaggggaaagctggcaagattttttacgtaataatgctaaaagtatgagatgtgctttactaagccatcgcgatggagcaaaagtatgtttaggtacacgctggacagaacaaatgtatgaaagtgctgaaaatatgttagcctttttatgccaacaaggtttttcactagagaatgcattatatgcagtgagtgctgtgagggtgtttactttaggttgcgtattgtttgatcaagagagccaagtcgctaaagaagaaagggaaacacctactactgctagtatgccgccattattgcgacaaggttgggaattaaaggatcaccaaggtgcagagccagccttcttattcggccttgaattgatcatatgcggattagaaaaacaacttaaatgcgaaagtgggtcttaa

SEQ ID NO: 466 - DNA, 627 bp, Artificial Sequence
  synthetic construct; Sulfonylurea responsive repressor
atgggatctagattagataaaagtaaagtgattaacagcgcattagagctgcttaatgaggtcggaatcgaaggtttaacaacccgtaaactcgcccagaagctaggtgtagagcagcctacattgtattggcatgtaaaaaataagcgagctctgctcgacgccttagccattgagatgatggataggcaccaaactcacttttgccctttagaaggggaaagctggcaagattttttacgtaataatgctaaaagtatgagatgtgctttactaagccatcgcgatggagcaaaagtatgtttaggtacacgctggacagaacaaatgtatgaaggtgctgaaaatatgttagcctttttatgccaacaaggtttttcactagagaatgcattatatgcaatgagtgctgtgagggtgtttactttaggttgcgtattgtttgatcaagagagccaagtcgctaaagaagaaagggaaacacctactactgctagtatgccgccattattgcgacaaggttgggaattaaaggatcaccaaggtgcagagccagccttcttattcggccttgaattgatcatatgcggattagaaaaacaacttaaatgcgaaagtgggtcttaa

SEQ ID NO: 467 - DNA, 627 bp, Artificial Sequence
  synthetic construct; Sulfonylurea responsive repressor
atgggatctagattagataaaagtaaagtgattaacagcgcattagagctgcttaatgaggtcggaatcgaaggtttaacaacccgtaaactcgcccagaagctaggtgtagagcagcctacattgtattggcatgtaaaaaataagcgagctctgctcgacgccttagccattgagatgatggataggcaccaaactcactattgccctttagaaggggaaagctggcaagattttttacgtaataatgctaaaagtatgagatgtgctttactaagccatcgcgatggagcaaaagtatgtttaggtacacgctggacagaacaacattatgaagctgctgaaaatatgttagcctttttatgccaacaaggtttttcactagagaatgcattatatgcaatgagtgctgtgagggtgtttactttaggttgcgtattgtttgatcaagagagccaagtcgctaaagaagaaagggaaacacctactactgctagtatgccgccattagtgcgacaagcttgggaattaaaggatcaccaaggtgcagagccagccttcttattcggccttgaattgatcatatgcggattagaaaaacaacttaaatgcgaaagtgggtcttaa

SEQ ID NO: 468 - DNA, 627 bp, Artificial Sequence
  synthetic construct; Sulfonylurea responsive repressor
atgggatctagattagataaaagtaaagtgattaacagcgcattagagctgcttaatgaggtcggaatcgaaggtttaacaacccgtaaactcgcccagaagctaggtgtagagcagcctacattgtattggcatgtaaaaaataagcgagctctgctcgacgccttagccattgagatgatggataggcacgcaactcactattgccctttagaaggggaaagctggcaagattttttacgtaataatgctaaaagtatgagatgtgctttactaagccatcgcgatggagcaaaagtatgtttaggtacacgctggacagaacaattgtatgaaactgctgaaaatcaattagcctttttatgccaacaaggtttttcactagagaatgcattatatgcaatgagtgctgtgaggaactttactttaggttgcgtattgtttgatcaagagagccaagtcgctaaagaagaaagggaaacacctactactgctagtatgccgccattagtgcgacaagcttgggaattaaaggatcaccaaggtgcagagccagccttcttattcggccttgaattgatcatatgcggattagaaaaacaacttaaatgcgaaagtgggtcttaa

SEQ ID NO: 469 - DNA, 627 bp, Artificial Sequence
  synthetic construct; Sulfonylurea responsive repressor
atgggatctagattagataaaagtaaagtgattaacagcgcattagagctgcttaatgaggtcggaatcgaaggtttaacaacccgtaaactcgcccagaagctaggtgtagagcagcctacattgtattggcatgtaaaaaataagcgagctctgctcgacgccttagccattgagatgatggataggcacgcaactcacatgtgccctttagaaggggaaagctggcaagattttttacgtaatactgctaaaagtatgagatgtgctttactaagccatcgcgatggagcaaaagtatgtttaggtacacgctggacagaaaaacaatatgaaactgctgaaaatatgttagcctttttatgccaacaaggtttttcactagagaatgcattatatgcagtgagtgctgtgagggtgtttactttaggttgcgtattgtttgatcaagagagccaagtcgctaaagaagaaagggaaacacctactactgctagtatgccgccattattgcgacaagtttgggaattaaaggatcaccaaggtgcagagccagccttcttattcggccttgaattgatcatatgcggattagaaaaacaacttaaatgcgaaagtgggtcttaa

SEQ ID NO: 470 - DNA, 627 bp, Artificial Sequence
  synthetic construct; Sulfonylurea responsive repressor
atgggatctagattagataaaagtaaagtgattaacagcgcattagagctgcttaatgaggtcggaatcgaaggtttaacaacccgtaaactcgcccagaagctaggtgtagagcagcctacattgtattggcatgtaaaaaataagcgagctctgctcgacgccttagccattgagatgatggataggcacgcaactcactattgccctttagaaggggaaagctggcaagattttttacgtaatactgctaaaagtatgagatgtgctttactaagccatcgcgatggagcaaaagtatgtttaggtacacgctggacagaaaaattgtatgaaactgctgaaaatatgttagcctttttatgccaacaaggtttttcactagagaatgcattatatgcagtgagtgctgtgagggtgtttactttaggttgcgtattgtttgatcaagagctccaagtcgctaaagaagaaagggaaacacctactactgctagtatgccgccattagtgcgacaagcttgggaattaaaggatcaccaaggtgcagagccagccttcttattcggccttgaattgatcatatgcggattagaaaaacaacttaaatgcgaaagtgggtcttaa

SEQ ID NO: 471 - DNA, 627 bp, Artificial Sequence
  synthetic construct; Sulfonylurea responsive repressor
atgggatctagattagataaaagtaaagtgattaacagcgcattagagctgcttaatgaggtcggaatcgaaggtttaacaacccgtaaactcgcccagaagctaggtgtagagcagcctacattgtattggcatgtaaaaaataagcgagctctgctcgacgccttagccattgagatgatggataggcacgcaactcacttttgccctttagaaggggaaagctggcaagattttttacgtaatactgctaaaagtatgagatgtgctttactaagccatcgcgatggagcaaaagtatgtttaggtacacgctggacagaacaattgtatgaaactgctgaaaatatgttagcctttttatgccaacaaggtttttcactagagaatgcattatatgcaatgagtgctgtgagggtgtttactttaggttgcgtattgtttgatcaagagagccaagtcgctaaagaagaaagggaaacacctactactgctagtatgccgccattagtgcgacaaggttgggaattaaaggatcaccaaggtgcagagccagccttcttattcggccttgaattgatcatatgcggattagaaaaacaacttaaatgcgaaagtgggtcttaa

SEQ ID NO: 472 - DNA, 627 bp, Artificial Sequence
  synthetic construct; Sulfonylurea responsive repressor
atgggatctagattagataaaagtaaagtgattaacagcgcattagagctgcttaatgaggtcggaatcgaaggtttaacaacccgtaaactcgcccagaagctaggtgtagagcagcctacattgtattggcatgtaaaaaataagcgagctctgctcgacgccttagccattgagatgatggataggcaccaaactcacttgtgccctttagaaggggaaagctggcaagattttttacgtaataatgctaaaagtatgagatgtgctttactcagccatcgcgatggagcaaaagtatgtttaggtacacgctggacagaaaaacattatgaagctgctgaaaatcaattagcctttttatgccaacaaggtttttcactagagaatgcattatatgcaatgagtgctgtgagggtgtttactttaggttgcgtattgtttgatcaagagagccaagtcgctaaagaagaaagggaaacacctactactgctagtatgccgccattattgcgacaaggttgggaattaaaggatcaccaaggtgcagagccagccttcttattcggccttgaattgatcatatgcggattagaaaaacaacttaaatgcgaaagtgggtcttaa

SEQ ID NO: 473 - DNA, 627 bp, Artificial Sequence
  synthetic construct; Sulfonylurea responsive repressor
  misc_feature (193)..(193): n is a, c, g, or t
  misc_feature (328)..(328): n is a, c, g, or t
atgggatctagattagataaaagtaaagtgattaacagcgcattagagctgcttaatgaggtcggaatcgaaggtttaacaacccgtaaactcgcccagaagctaggtgtagagcagcctacattgtattggcatgtaaaaaataagcgagctctgctcgacgccttagccattgagatgatggataggcacncaactcactattgccctttagaaggggaaagctggcaagattttttacgtaataatgctaaaagtatgagatgtgctttactaagccatcgcgatggagcaaaagtatggttaggtacacgctggacagaacaantgtatgaaactgctgaaaatcaattagcctttttatgccaacaaggtttttcactagagaatgcattatatgcagtgagtgctgtgagggtgtttactttaggttgcgtattgtttgatcaagagctccaagtcgctaaagaagaaagggaaacacctactactgctagtatgccgccattattgcgacaaggtttggaattaaaggatcaccaaggtgcagagccagccttcttattcggccttgaattgatcatatgcggattagaaaaacaacttaaatgcgaaagtgggtcttaa

SEQ ID NO: 474 - DNA, 627 bp, Artificial Sequence
  synthetic construct; Sulfonylurea responsive repressor
atgggatctagattagataaaagtaaagtgattaacagcgcattagagctgcttaatgaggtcggaatcgaaggtttaacaacccgtaaactcgcccagaagctaggtgtagagcagcctacattgtattggcatgtaaaaaataagcgagctctgctcgacgccttagccattgagatgatggataggcacgcaactcactattgccctttagaaggggaaagctggcaagattttttacgtaatactgctaaaagtatgagatgtgctttactaagccatcgcgatggagcaaaagtatgtttaggtacacgctggacagaacaacaatatgaaagtgctgaaaatatgttagcctttttatgccaacaaggtttttcactagagaatgcattatatgcaatgagtgctgtgagggtgtttactttaggttgcgtattgtttgatcaagagctccaagtcgctaaagaagaaagggaaacacctactactgctagtatgccgccattagtgcgacaaggttgggaattaaaggatcaccaaggtgcagagccagccttcttattcggccttgaattgatcatatgcggattagaaaaacaacttaaatgcgaaagtgggtcttaa

SEQ ID NO: 475 - DNA, 627 bp, Artificial Sequence
  synthetic construct; Sulfonylurea responsive repressor
atgggatctagattagataaaagtaaagtgattaacagcgcattagagctgcttaatgaggtcggaatcgaaggtttaacaacccgtaaactcgcccagaagctaggtgtagagcagcctacattgtattggcatgtaaaaaataagcgagctctgctcgacgccttagccattgagatgatggataggcacgcaactcactattgccctttagaaggggaaagctggcaagattttttacgtaatactgctaaaagtatgagatgtgctttactaagccatcgcgatggagcaaaagtatgtttaggtacacgctggacagaacaacaatatgaaactgctgaaaatatgttagcctttttatgccaacaaggtttttcactagagaatgcattatatgcagtgagtgctgtgagggtgtttactttaggttgcgtattgtttgatcaagagctccaagtcgctaaagaagaaagggaaacacctactactgctagtatgccgccattagtgcgacaagcttgggaattaaaggatcaccaaggtgcagagccagccttcttattcggccttgaattgatcatatgcggattagaaaaacaacttaaatgcgaaagtgggtcttaa

SEQ ID NO: 476 - DNA, 627 bp, Artificial Sequence
  synthetic construct; Sulfonylurea responsive repressor
  misc_feature (204)..(204): n is a, c, g, or t
  misc_feature (303)..(303): n is a, c, g, or t
  misc_feature (420)..(420): n is a, c, g, or t
atgggatctagattagataaaagtaaagtgattaacagcgcattagagctgcttaatgaggtcggaatcgaaggtttaacaacccgtaaactcgcccagaagctaggtgtagagcagcctacattgtattggcatgtaaaaaataagcgagctctgctcgacgccttagccattgagatgatggataggcacccaactcactantgccctttagaaggggaaagctggcaagattttttacgtaatamtgctaaaagtatgagatgtgctttactaagccatcgcgatggagcaaaagtatgnttaggtacacgctggacagaacaactgtatgaaactgctgaaaatatgttagcctttttatgccaacaaggtttttcactagagaatgcattatatgcaatgagtgctgtgagggtntttactttaggttgcgtattgtttgatcaagagagccaagtcgctaaagaagaaagggaaacacctactactgctagtatgccgccattaktgcgacaagtttgggaattaaaggatcaccaaggtgcagagccagccttcttattcggccttgaattgatcatatgcggattagaaaaacaacttaaatgcgaaagtgggtcttaa

SEQ ID NO: 477 - DNA, 627 bp, Artificial Sequence
  synthetic construct; Sulfonylurea responsive repressor
  misc_feature (513)..(513): n is a, c, g, or t
atgggatctagattagataaaagtaaagtgattaacagcgcattagagctgcttaatgaggtcggaatcgaaggtttaacaacccgtaaactcgcccagaagctaggtgtagagcagcctacattgtattggcatgtaaaaaataagcgagctctgctcgacgccttagccattgagatgatggataggcacgcaactcactattgccctttagaaggggaaagctggcaagattttttacgtaataatgctaaaagtatgagatgtgctttactaagccatcgcgatggagcaaaagtatgtttaggtacacgctggacagaacaattgtatgaaactgctgaaaatcaattagcctttttatgccaacaaggtttttcactagagaatgcattatatgcagtgagtgctgtgagggtgtttactttaggttgcgtattgtttgatcaagagagccaagtcgctaaagaagaaagggaaacacctactactgctagtatgccgccattattncgacaaggttgggaattaaaggatcaccaaggtgcagagccagccttcttattcggccttgaattgatcatatgcggattagaaaaacaacttaaatgcgaaagtgggtcttaa

SEQ ID NO: 478 - DNA, 627 bp, Artificial Sequence
  synthetic construct; Sulfonylurea responsive repressor
atgggatctagattagataaaagtaaagtgattaacagcgcattagagctgcttaatgaggtcggaatcgaaggtttaacaacccgtaaactcgcccagaagctaggtgtagagcagcctacattgtattggcatgtaaaaaataagcgagctctgctcgacgccttagccattgagatgatggataggcaccaaactcactattgccctttagaaggggaaagctggcaagattttttacgtaataatgctaaaagtatgagatgtgctttactaagccatcgcgatggagcaaaagtatgtttaggtacacgctggacagaacaacaatatgaagctgctgaaaatcaattagcctttttatgccaacaaggtttttcactagagaatgcattatatgcaatgagtgctgtgagggtgtttactttaggttgcgtattgtttgatcaagagctccaagtcgctaaagaagaaagggaaacacctactactgctagtatgccgccattagtgcgacaagcttgggaattaaaggatcaccaaggtgcagagccagccttcttattcggccttgaattgatcatatgcggattagaaaaacaacttaaatgcgaaagtgggtcttaa

SEQ ID NO: 479 - DNA, 627 bp, Artificial Sequence
  synthetic construct; Sulfonylurea responsive repressor
atgggatctagattagataaaagtaaagtgattaacagcgcattagagctgcttaatgaggtcggaatcgaaggtttaacaacccgtaaactcgcccagaagctaggtgtagagcagcctacattgtattggcatgtaaaaaataagcgagctctgctcgacgccttagccattgagatgatggataggcaccaaactcactattgccctttagaaggggaaagctggcaagattttttacgtaatactgctaaaagtatgagatgtgctttactaagccatcgcgatggagcaaaagtatgtttaggtacacgctggacagaacaaatgtatgaaagtgctgaaaatatgttagcctttttatgccaacaaggtttttcactagagaatgcattatatgcagtgagtgctgtgagggtgtttactttaggttgcgtattgtttgatcaagagagccaagtcgctaaagaagaaagggaaacacctactactgctagtatgccgccattattgcgacaaggttgggaattaaaggatcaccaaggtgcagagccagccttcttattcggccttgaattgatcatatgcggattagaaaaacaacttaaatgcgaaagtgggtcttaa

SEQ ID NO: 480 - DNA, 627 bp, Artificial Sequence
  synthetic construct; Sulfonylurea responsive repressor
atgggatctagattagataaaagtaaagtgattaacagcgcattagagctgcttaatgaggtcggaatcgaaggtttaacaacccgtaaactcgcccagaagctaggtgtagagcagcctacattgtattggcatgtaaaaaataagcgagctctgctcgacgccttagccattgagatgatggataggcaccaaactcactattgccctttagaaggggaaagctggcaagattttttacgtaataatgctaaaagtatgagatgtgctttactaagccatcgcgatggagcaaaagtatgtttaggtacacgctggacagaacaacaatatgaaagtgctgaaaatcaattagcctttttatgccaacaaggtttttcactagagaatgcattatatgcagtgagtgctgtgagggtgtttactttaggttgcgtattgtttgatcaagagagccaagtcgctaaagaagaaagggaaacacctactactgctagtatgccgccattagtgcgacaagcttgggaattaaaggatcaccaaggtgcagagccagccttcttattcggccttgaattgatcatatgcggattagaaaaacaacttaaatgcgaaagtgggtcttaa

SEQ ID NO: 481 - DNA, 627 bp, Artificial Sequence
  synthetic construct; Sulfonylurea responsive repressor
atgggatctagattagataaaagtaaagtgattaacagcgcattagagctgcttaatgaggtcggaatcgaaggtttaacaacccgtaaactcgcccagaagctaggtgtagagcagcctacattgtattggcatgtaaaaaataagcgagctctgctcgacgccttagccattgagatgatggataggcaccaaactcactattgccctttagaaggggaaagctggcaagattttttacgtaataatgctaaaagtatgagatgtgctttactaagccatcgcgatggagcaaaagtatgtttaggtacacgctggacagaaaaattgtatgaaactgctgaaaatatgttagcctttttatgccaacaaggtttttcactagagaatgcattatatgcagtgagtgctgtgagggtgtttactttaggttgcgtattgtttgatcaagagagccaagtcgctaaagaagaaagggaaacacctactactgctagtatgccgccattattgcgacaagtttgggaattaaaggatcaccaaggtgcagagccagccttcttattcggccttgaattgatcatatgcggattagaaaaacaacttaaatgcgaaagtgggtcttaa

SEQ ID NO: 482 - DNA, 627 bp, Artificial Sequence
  synthetic construct; Sulfonylurea responsive repressor
atgggatctagattagataaaagtaaagtgattaacagcgcattagagctgcttaatgaggtcggaatcgaaggtttaacaacccgtaaactcgcccagaagctaggtgtagagcagcctacattgtattggcatgtaaaaaataagcgagctctgctcgacgccttagccattgagatgatggataggcacgcaactcactattgccctttagaaggggaaagctggcaagattttttacgtaatactgctaaaagtatgagatgtgctttactaagccatcgcgatggagcaaaagtatgtttaggtacacgctggacagaacaaatgtatgaaactgctgaaaatatgttagcctttttatgccaacaaggtttttcactagagaatgcattatatgcaatgagtgctgtgagggtgtttactttaggttgcgtattgtttgatcaagagctccaagtcgctaaagaagaaagggaaacacctactactgctagtatgccgccattagtgcgacaaggttgggaattaaaggatcaccaaggtgcagagccagccttcttattcggccttgaattgatcatatgcggattagaaaaacaacttaaatgcgaaagtgggtcttaa

SEQ ID NO: 483 - DNA, 627 bp, Artificial Sequence
  synthetic construct; Sulfonylurea responsive repressor
atgggatctagattagataaaagtaaagtgattaacagcgcattagagctgcttaatgaggtcggaatcgaaggtttaacaacccgtaaactcgcccagaagctaggtgtagagcagcctacattgtattggcatgtaaaaaataagcgagctctgctcgacgccttagccattgagatgatggataggcaccaaactcactattgccctttagaaggggaaagctggcaagattttttacgtaataatgctaaaagtatgagatgtgctttactaagccatcgcgatggagcaaaagtatgtttaggtacacgctggacagaacaaatgtatgaaactgctgaaaatcaattagcctttttatgccaacaaggtttttcactagagaatgcattatatgcaatgagtgctgtgagggtgtttactttaggttgcgtattgtttgatcaagagctccaagtcgctaaagaagaaagggaaacacctactactgctagtatgccgccattattgcgacaaggttgggaattaaaggatcaccaaggtgcagagccagccttcttattcggacttgaattgatcatatgcggattagaaaaacaacttaaatgcgaaagtgggtcttaa

SEQ ID NO: 484 - DNA, 627 bp, Artificial Sequence
  synthetic construct; Sulfonylurea responsive repressor
atgggatctagattagataaaagtaaagtgattaacagcgcattagagctgcttaatgaggtcggaatcgaaggtttaacaacccgtaaactcgcccagaagctaggtgtagagcagcctacattgtattggcatgtaaaaaataagcgagctctgctcgacgccttagccattgagatgatggataggcacgcaactcactattgccctttagaaggggaaagctggcaagattttttacgtaatactgctaaaagtatgagatgtgctttactaagccatcgcgatggagcaaaagtatgtttaggtacacgctggacagaacaacaatatgaagctgctgaaaatcaattagcctttttatgccaacaaggtttttcactagagaatgcattatatgcagtgagtgctgtgagggtgtttactttaggttgcgtattgtttgatcaagagagccaagtcgctaaagaagaaagggaaacacctactactgctagtatgccgccattattgcgacaaggttgggaattaaaggatcaccaaggtgcagagccagccttcttattcggccttgaattgatcatatgcggattagaaaaacaacttaaatgcgaaagtgggtcttaa

SEQ ID NO: 485 - DNA, 627 bp, Artificial Sequence
  synthetic construct; Sulfonylurea responsive repressor
atgggatctagattagataaaagtaaagtgattaacagcgcattagagctgcttaatgaggtcggaatcgaaggtttaacaacccgtaaactcgcccagaagctaggtgtagagcagcctacattgtattggcatgtaaaaaataagcgagctctgctcgacgccttagccattgagatgatggataggcaccaaactcactattgccctttagaaggggaaagctggcaagattttttacgtaatactgctaaaagtatgagatgtgctttactaagccatcgcgatggagcaaaagtatggttaggtacacgctggacagaacaacaatatgaaagtgctgaaaatatgttagcctttttatgccaacaaggtttttcactagagaatgcattatatgcagtgagtgctgtgagggtgtttactttaggttgcgtattgtttgatcaagagctccaagtcgctaaagaagaaagggaaacacctactactgctagtatgccgccattagtgcgacaagcttgggaattaaaggatcaccaaggtgcagagccagccttcttattcggccttgaattgatcatatgcggattagaaaaacaacttaaatgcgaaagtgggtcttaa

SEQ ID NO: 486 - DNA, 627 bp, Artificial Sequence
  synthetic construct; Sulfonylurea responsive repressor
atgggatctagattagataaaagtaaagtgattaacagcgcattagagctgcttaatgaggtcggaatcgaaggtttaacaacccgtaaactcgcccagaagctaggtgtagagcagcctacattgtattggcatgtaaaaaataagcgagctctgctcgacgccttagccattgagatgatggataggcaccaaactcacatgtgccctttagaaggggaaagctggcaagattttttacgtaataatgctaaaagtatgagatgtgctttactaagccatcgcgatggagcaaaagtatgtttaggtacacgctggacagaaaaattgtatgaaactgctgaaaatcaattagcctttttatgccaacaaggtttttcactagagaatgcattatatgcagtgagtgctgtgagggtgtttactttaggttgcgtattgtttgatcaagagagccaagtcgctaaagaagaaagggaaacacctactactgctagtatgccgccattagtgcgacaagcttgggaattaaaggatcaccaaggtgcagagccagccttcttattcggccttgaattgatcatatgcggattagaaaaacaacttaaatgcgaaagtgggtcttaa

SEQ ID NO: 487 - DNA, 627 bp, Artificial Sequence
  synthetic construct; Sulfonylurea responsive repressor
atgggatctagattagataaaagtaaagtgattaacagcgcattagagctgcttaatgaggtcggaatcgaaggtttaacaacccgtaaactcgcccagaagctaggtgtagagcagcctacattgtattggcatgtaaaaaataagcgagctctgctcgacgccttagccattgagatgatggataggcaccaaactcactattgccctttagaaggggaaagctggcaagattttttacgtaatactgctaaaagtatgagatgtgctttactaagccatcgcgatggagcaaaagtatgtttaggtacacgctggacagaaaaacaatatgaaactgctgaaaatatgttagcctttttatgccaacaaggtttttcactagagaatgcattatatgcaatgagtgctgtgagggtgtttactttaggttgcgtattgtttgatcaagagagccaagtcgctaaagaagaaagggaaacacctactactgctagtatgccgccattagtgcgacaagtttgggaattaaaggatcaccaaggtgcagagccagccttcttattcggccttgaattgatcatatgcggattagaaaaacaacttaaatgcgaaagtgggtcttaa

SEQ ID NO: 488 - DNA, 627 bp, Artificial Sequence
  synthetic construct; Sulfonylurea responsive repressor
atgggatctagattagataaaagtaaagtgattaacagcgcattagagctgcttaatgaggtcggaatcgaaggtttaacaacccgtaaactcgcccagaagctaggtgtagagcagcctacattgtattggcatgtaaaaaataagcgagctctgctcgacgccttagccattgagatgatggataggcaccaaactcacttttgccctttagaaggggaaagctggcaagattttttacgtaataatgctaaaagtatgagatgtgctttactaagccatcgcgatggagcaaaagtatgtttaggtacacgctggacagaacaacaatatgaaagtgctgaaaatcaattagcctttttatgccaacaaggtttttcactagagaatgcattatatgcagtgagtgctgtgagggtgtttactttaggttgcgtattgtttgatcaagagctccaagtcgctaaagaagaaagggaaacacctactactgctagtatgccgccattattgcgacaagctttggaattaaaggatcaccaaggtgcagagccagccttcttattcggccttgaattgatcatatgcggattagaaaaacaacttaaatgcgaaagtgggtcttaa

SEQ ID NO: 489 - DNA, 627 bp, Artificial Sequence
  synthetic construct; Sulfonylurea responsive repressor
atgggatctagattagataaaagtaaagtgattaacagcgcattagagctgcttaatgaggtcggaatcgaaggtttaacaacccgtaaactcgcccagaagctaggtgtagagcagcctacattgtattggcatgtaaaaaataagcgagctctgctcgacgccttagccattgagatgatggataggcacgcaactcactattgccctttagaaggggaaagctggcaagattttttacgtaataatgctaaaagtatgagatgtgctttactaagccatcgcgatggagcaaaagtatgtttaggtacacgctggacagaaaaacaatatgaaagtgctgaaaatatgttagcctttttatgccaacaaggtttttcactagagaatgcattatatgcagtgagtgctgtgaggaactttactttaggttgcgtattgtttgatcaagagagccaagtcgctaaagaagaaagggaaacacctactactgctagtatgccgccattattgcgacaaggttgggaattaaaggatcaccaaggtgcagagccagccttcttattcggccttgaattgatcatatgcggattagaaaaacaacttaaatgcgaaagtgggtcttaa

SEQ ID NO: 490 - DNA, 627 bp, Artificial Sequence
  synthetic construct; Sulfonylurea responsive repressor
atgggatctagattagataaaagtaaagtgattaacagcgcattagagctgcttaatgaggtcggaatcgaaggtttaacaacccgtaaactcgcccagaagctaggtgtagagcagcctacattgtattggcatgtaaaaaataagcgagctctgctcgacgccttagccattgagatgatggataggcacgcaactcacatgtgccctttagaaggggaaagctggcaagattttttacgtaataatgctaaaagtatgagatgtgctttactaagccatcgcgatggagcaaaagtatgtttaggtacacgctggacagaaaaacattatgaaagtgctgaaaatatgttagcctttttatgccaacaaggtttttcactagagaatgcattatatgcagtgagtgctgtgagggtgtttactttaggttgcgtattgtttgatcaagagctccaagtcgctaaagaagaaagggaaacacctactactgctagtatgccgccattagtgcgacaagtttgggaattaaaggatcaccaaggtgcagagccagccttcttattcggccttgaattgatcatatgcggattagaaaaacaacttaaatgcgaaagtgggtcttaa

SEQ ID NO: 491 - DNA, 627 bp, Artificial Sequence
  synthetic construct; Sulfonylurea responsive repressor
  misc_feature (194)..(194): n is a, c, g, or t
  misc_feature (350)..(350): n is a, c, g, or t
atgggatctagattagataaaagtaaagtgattaacagcgcattagagctgcttaatgaggtcggaatcgaaggtttaacaacccgtaaactcgcccagaagctaggtgtagagcagcctacattgtattggcatgtaaaaaataagcgagctctgctcgacgccttagccattgagatgatggataggcaccnaactcacttgtgccctttagaaggggaaagctggcaagattttttacgtaatactgctaaaagtatgagatgtgctttactaagccatcgcgatggagcaaaagtatgtttaggtacacgctggacagaacaattgtatgaagctgctgaaaatcnrttagcctttttatgccaacaaggtttttcactagagaatgcattatatgcaatgagtgctgtgagggtgtttactttaggttgcgtattgtttgatcaagagagccaagtcgctaaagaagaaagggaaacacctactactgctagtatgccgccattagtgcgacaagtttgggaattaaaggatcaccaaggtgcagagccagccttcttattcggccttgaattgatcatatgcggattagaaaaacaacttaaatgcgaaagtgggtcttaa

SEQ ID NO: 492 - DNA, 627 bp, Artificial Sequence
  synthetic construct; Sulfonylurea responsive repressor
atgggatctagattagataaaagtaaagtgattaacagcgcattagagctgcttaatgaggtcggaatcgaaggtttaacaacccgtaaactcgcccagaagctaggtgtagagcagcctacattgtattggcatgtaaaaaataagcgagctctgctcgacgccttagccattgagatgatggataggcaccaaactcactattgccctttagaaggggaaagctggcaagattttttacgtaataatgctaaaagtatgagatgtgctttactaagccatcgcgatggagcaaaagtatgtttaggtacacgctggacagaacaacattatgaaggtgctgaaaatatgttagcctttttatgccaacaaggtttttcactagagaatgcattatatgcagtgagtgctgtgagggtgtttactttaggttgcgtattgtttgatcaagagagccaagtcgctaaagaagaaagggaaacacctactactgctagtatgccgccattattgcgacaagtttgggaattaaaggatcaccaaggtgcagagccagccttcttattcggccttgaattgatcatatgcggattagaaaaacaacttaaatgcgaaagtgggtcttaa

SEQ ID NO: 493 - DNA, 627 bp, Artificial Sequence
  synthetic construct; Sulfonylurea responsive repressor
atgggatctagattagataaaagtaaagtgattaacagcgcattagagctgcttaatgaggtcggaatcgaaggtttaacaacccgtaaactcgcccagaagctaggtgtagagcagcctacattgtattggcatgtaaaaaataagcgagctctgctcgacgccttagccattgagatgatggataggcacgcaactcacatttgccctttagaaggggaaagctggcaagattttttacgtaataatgctaaaagtatgagatgtgctttactaagccatcgcgatggagcaaaagtatgtttaggtacacgctggacagaacaattgtatgaaagtgctgaaaatatgttagcctttttatgccaacaaggtttttcactagagaatgcattatatgcagtgagtgctgtgagggtgtttactttaggttgcgtattgtttgatcaagagagccaagtcgctaaagaagaaagggaaacacctactactgctagtatgccgccattagtgcgacaagtttgggaattaaaggatcaccaaggtgcagagccagccttcttattcggccttgaattgatcatatgcggattagaaaaacaacttaaatgcgaaagtgggtcttaa

SEQ ID NO: 494 - DNA, 627 bp, Artificial Sequence
  synthetic construct; Sulfonylurea responsive repressor
atgggatctagattagataaaagtaaagtgattaacagcgcattagagctgcttaatgaggtcggaatcgaaggtttaacaacccgtaaactcgcccagaagctaggtgtagagcagcctacattgtattggcatgtaaaaaataagcgagctctgctcgacgccttagccattgagatgatggataggcaccaaactcactattgccctttagaaggggaaagctggcaagattttttacgtaataatgctaaaagtatgagatgtgctttactaagccatcgcgatggagcaaaagtatgtttaggtacacgctggacagaaaaacaatatgaaactgctgaaaatcaattagcctttttatgccaacaaggtttttcactagagaatgcattatatgcaatgagtgctgtgaggaactttactttaggttgcgtattgtttgatcaagagagccaagtcgctaaagaagaaagggaaacacctactactgctagtatgccgccattattgcgacaaggttgggaattaaaggatcaccaaggtgcagagccagccttcttattcggccttgaattgatcatatgcggattagaaaaacaacttaaatgcgaaagtgggtcttaa

SEQ ID NO: 495 - DNA, 627 bp, Artificial Sequence
  synthetic construct; Sulfonylurea responsive repressor
atgggatctagattagataaaagtaaagtgattaacagcgcattagagctgcttaatgaggtcggaatcgaaggtttaacaacccgtaaactcgcccagaagctaggtgtagagcagcctacattgtattggcatgtaaaaaataagcgagctctgctcgacgccttagccattgagatgatggataggcaccaaactcactattgccctttagaaggggaaagctggcaagattttttacgtaataatgctaaaagtatgagatgtgctttactaagccatcgcgatggagcaaaagtatgtttaggtacacgctggacagaacaacattatgaaactgctgaaaatatgttagcctttttatgccaacaaggtttttcactagagaatgcattatatgcaatgagtgctgtgagggtgtttactttaggttgcgtattgtttgatcaagagagccaagtcgctaaagaagaaagggaaacacctactactgctagtatgccgccattattgcgacaaggttgggaattaaaggatcaccaaggtgcagagccagccttcttattcggccttgaattgatcatatgcggattagaaaaacaacttaaatgcgaaagtgggtcttaa

SEQ ID NO: 496 - DNA, 627 bp, Artificial Sequence
  synthetic construct; Sulfonylurea responsive repressor
  misc_feature (338)..(338): n is a, c, g, or t
  misc_feature (403)..(403): n is a, c, g, or t
atgggatctagattagataaaagtaaagtgattaacagcgcattagagctgcttaatgaggtcggaatcgaaggtttaacaacccgtaaactcgcccagaagctaggtgtagagcagcctacattgtattggcatgtaaaaaataagcgagctctgctcgacgccttagccattgagatgatggataggcacccaactcacttgtgccctttagaaggggaaagctggcaagattttttacgtaatactgctaaaagtatgagatgtgctttactaagccatcgcgatggagcaaaagtatgtttaggtacacgctggacagaacaacwrtatgaagntgctgaaaatcwrttagcctttttatgccaacaaggtttttcactagagaatgcattatatgcantgagtgctgtgagggwgtttactttaggttgcgtattgtttgatcaagagatccaagtcgctaaagaagaaagggaaacacctactactgctagtatgccgccattagtgcgacaagcttgggaattaaaggatcaccaaggtgcagagccagccttcttattcggccttgaattgatcatatgcggattagaaaaacaacttaaatgcgaaagtgggtcttaa

SEQ ID NO: 497 - DNA, 627 bp, Artificial Sequence
  synthetic construct; Sulfonylurea responsive repressor
atgggatctagattagataaaagtaaagtgattaacagcgcattagagctgcttaatgaggtcggaatcgaaggtttaacaacccgtaaactcgcccagaagctaggtgtagagcagcctacattgtattggcatgtaaaaaataagcgagctctgctcgacgccttagccattgagatgatggataggcacgcaactcacatttgccctttagaaggggaaagctggcaagattttttacgtaataatgctaaaagtatgagatgtgctttactaagccatcgcgatggagcaaaagtatgtttaggtacacgctggacagaacaaatgtatgaaactgctgaaaatcaattagcctttttatgccaacaaggtttttcactagagaatgcattatatgcaatgagtgctgtgagggtgtttactttaggttgcgtattgtttgatcaagagctccaagtcgctaaagaagaaagggaaacacctactactgctagtatgccgccattattgcgacaagtttgggaattaaaggatcaccaaggtgcagagccagccttcttattcggccttgaattgatcatatgcggattagaaaaacaacttaaatgcgaaagtgggtcttaa

SEQ ID NO: 498 - DNA, 627 bp, Artificial Sequence
  synthetic construct; Sulfonylurea responsive repressor
atgggatctagattagataaaagtaaagtgattaacagcgcattagagctgcttaatgaggtcggaatcgaaggtttaacaacccgtaaactcgcccagaagctaggtgtagagcagcctacattgtattggcatgtaaaaaataagcgagctctgctcgacgccttagccattgagatgatggataggcaccaaactcacatttgccctttagaaggggaaagctggcaagattttttacgtaataatgctaaaagtatgagatgtgctttactaagccatcgcgatggagcaaaagtatgtttaggtacacgctggacagaaaaacattatgaaactgctgaaaatatgttagcctttttatgccaacaaggtttttcactagagaatgcattatatgcaatgagtgctgtgagggtgtttactttaggttgcgtattgtttgatcaagagagccaagtcgctaaagaagaaagggaaacacctactactgctagtatgccgccattagtgcgacaagtttgggaattaaaggatcaccaaggtgcagagccagccttcttattcggccttgaattgatcatatgcggattagaaaaacaacttaaatgcgaaagtgggtcttaa

SEQ ID NO: 499 - DNA, 627 bp, Artificial Sequence
  synthetic construct; Sulfonylurea responsive repressor
atgggatctagattagataaaagtaaagtgattaacagcgcattagagctgcttaatgaggtcggaatcgaaggtttaacaacccgtaaactcgcccagaagctaggtgtagagcagcctacattgtattggcatgtaaaaaataagcgagctctgctcgacgccttagccattgagatgatggataggcaccaaactcacgtttgccctttagaaggggaaagctggcaagattttttacgtaatactgctaaaagtatgagatgtgctttactaagccatcgcgatggagcaaaagtatgtttaggtacacgctggacagaacaattgtatgaaactgctgaaaatatgttagcctttttatgccaacaaggtttttcactagagaatgcattatatgcagtgagtgctgtgagggtgtttactttaggttgcgtattgtttgatcaagagagccaagtcgctaaagaagaaagggaaacacctactactgctaggatgccgccattattgcgacaaggttgggaattaaaggatcaccaaggtgcagagccagccttcttattcggccttgaattgatcatatgcggattagaaaaacaacttaaatgcgaaagtgggtcttaa

SEQ ID NO: 500 - DNA, 627 bp, Artificial Sequence
  synthetic construct; Sulfonylurea responsive repressor
atgggatctagattagataaaagtaaagtgattaacagcgcattagagctgcttaatgaggtcggaatcgaaggtttaacaacccgtaaactcgcccagaagctaggtgtagagcagcctacattgtattggcatgtaaaaaataagcgagctctgctcgacgccttagccattgagatgatggataggcaccaaactcactattgccctttagaaggggaaagctggcaagattttttacgtaatactgctaaaagtatgagatgtgctttactaagccatcgcgatggagcaaaagtatgtttaggtacacgctggacagaacaattgtatgaaagtgctgaaaatatgttagcctttttatgccaacaaggtttttcactagagaatgcattatatgcaatgagtgctgtgagggtgtttactttaggttgcgtattgtttgatcaagagctccaagtcgctaaagaagaaagggaaacacctactactgctagtatgccgccattattgcgacaaggttgggaattaaaggatcaccaaggtgcagagccagccttcttattcggccttgaattgatcatatgcggattagaaaaacaacttaaatgcgaaagtgggtcttaa

SEQ ID NO: 501 - DNA, 627 bp, Artificial Sequence
  synthetic construct; Sulfonylurea responsive repressor
atgggatctagattagataaaagtaaagtgattaacagcgcattagagctgcttaatgaggtcggaatcgaaggtttaacaacccgtaaactcgcccagaagctaggtgtagagcagcctacattgtattggcatgtaaaaaataagcgagctctgctcgacgccttagccattgagatgatggataggcaccaaactcactattgccctttagaaggggaaagctggcaagattttttacgtaatactgctaaaagtatgagatgtgctttactaagccatcgcgatggagcaaaagtatgtttaggtacacgctggacagaaaaacaatatgaaactgctgaaaatcaattagcctttttatgccaacaaggtttttcactagagaatgcattatatgcagtgagtgctgtgagggtgtttactttaggttgcgtattgtttgatcaagagagccaagtcgctaaagaagaaagggaaacacctactactgctagtatgccgccattagtgcgacaagtttgggaattaaaggatcaccaaggtgcagagccagccttcttattcggccttgaattgatcatatgcggattagaaaaacaacttaaatgcgaaagtgggtcttaa

SEQ ID NO: 502 - DNA, 627 bp, Artificial Sequence
  synthetic construct; Sulfonylurea responsive repressor
atgggatctagattagataaaagtaaagtgattaacagcgcattagagctgcttaatgaggtcggaatcgaaggtttaacaacccgtaaactcgcccagaagctaggtgtagagcagcctacattgtattggcatgtaaaaaataagcgagctctgctcgacgccttagccattgagatgatggataggcacgcaactcactattgccctttagaaggggaaagctggcaagattttttacgtaataatgctaaaagtatgagatgtgctttactaagccatcgcgatggagcaaaagtatgtttaggtacacgctggacagaacaacattatgaaactgctgaaaatcaattagcctttttatgccaacaaggtttttcactagagaatgcattatatgcaatgagtgctgtgagggtgtttactttaggttgcgtattgtttgatcaagagagccaagtcgctaaagaagaaagggaaacacctactactgctagtatgccgccattagtgcgacaaggttgggaattaaaggatcaccaaggtgcagagccagccttcttattcggccttgaattgatcatatgcggattagaaaaacaacttaaatgcgaaagtgggtcttaa

SEQ ID NO: 503 - DNA, 627 bp, Artificial Sequence
  synthetic construct; Sulfonylurea responsive repressor
atgggatctagattagataaaagtaaagtgattaacagcgcattagagctgcttaatgaggtcggaatcgaaggtttaacaacccgtaaactcgcccagaagctaggtgtagagcagcctacattgtattggcatgtaaaaaataagcgagctctgctcgacgccttagccattgagatgatggataggcaccaaactcactattgccctttagaaggggaaagctggcaagattttttacgtaataatgctaaaagtatgagatgtgctttactaagccatcgcgatggagcaaaagtatgtttaggtacacgctggacagaaaaacattatgaaactgctgaaaatcaattagcctttttatgccaacaaggtttttcactagagaatgcattatatgcaatgagtgctgtgagggtgtttactttaggttgcgtattgtttgatcaagagagccaagtcgctaaagaagaaagggaaacacctactactgctagtatgccgccattattgcgacaagcttgggaattaaaggatcaccaaggtgcagagccagccttcttattcggccttgaattgatcatatgcggattagaaaaacaacttaaatgcgaaagtgggtcttaa

SEQ ID NO: 504 - DNA, 627 bp, Artificial Sequence
  synthetic construct; Sulfonylurea responsive repressor
atgggatctagattagataaaagtaaagtgattaacagcgcattagagctgcttaatgaggtcggaatcgaaggtttaacaacccgtaaactcgcccagaagctaggtgtagagcagcctacattgtattggcatgtaaaaaataagcgagctctgctcgacgccttagccattgagatgatggataggcaccaaactcactattgccctttagaaggggaaagctggcaagattttttacgtaataatgctaaaagtatgagatgtgctttactaagccatcgcgatggagcaaaagtatgtttaggtacacgctggacagaacaacattatgaagctgctgaaaatatgttagcctttttatgccaacaaggtttttcactagagaatgcattatatgcagtgagtgctgtgagggtgtttactttaggttgcgtattgtttgatcaagagagccaagtcgctaaagaagaaagggaaacacctactactgctagtatgccgccattattgcgacaagtttgggaattaaaggatcaccaaggtgcagagccagccttcttattcggccttgaattgatcatatgcggattagaaaaacaacttaaatgcgaaagtgggtcttaa

SEQ ID NO: 505 - DNA, 627 bp, Artificial Sequence
  synthetic construct; Sulfonylurea responsive repressor
atgggatctagattagataaaagtaaagtgattaacagcgcattagagctgcttaatgaggtcggaatcgaaggtttaacaacccgtaaactcgcccagaagctaggtgtagagcagcctacattgtattggcatgtaaaaaataagcgagctctgctcgacgccttagccattgagatgatggataggcaccaaactcactattgccctttagaaggggaaagctggcaagattttttacgtaataatgctaaaagtatgagatgtgctttactaagccatcgcgatggagcaaaagtatgtttaggtacacgctggacagaacaaatgtatgaagctgctgaaaatcaattagcctttttatgccaacaaggtttttcactagagaatgcattatatgcagtgagtgctgtgagggtgtttactttaggttgcgtattgtttgatcaagagctccaagtcgctaaagaagaaagggaaacacctactactgctagtatgccgccattagtgcgacaagtttgggaattaaaggatcaccaaggtgcagagccagccttcttattcggccttgaattgatcatatgcggattagaaaaacaacttaaatgcgaaagtgggtcttaa

SEQ ID NO: 506 - DNA, 627 bp, Artificial Sequence
  synthetic construct; Sulfonylurea responsive repressor
atgggatctagattagataaaagtaaagtgattaacagcgcattagagctgcttaatgaggtcggaatcgaaggtttaacaacccgtaaactcgcccagaagctaggtgtagagcagcctacattgtattggcatgtaaaaaataagcgagctctgctcgacgccttagccattgagatgatggataggcaccaaactcactattgccctttagaaggggaaagctggcaagattttttacgtaataatgctaaaagtatgagatgtgctttactaagccatcgcgatggagcaaaagtatgtttaggtacacgctggacagaaaaattgtatgaagctgctgaaaatatgttagcctttttatgccaacaaggtttttcactagagaatgcattatatgcagtgagtgctgtgagggtgtttactttaggttgcgtattgtttgatcaagagagccaagtcgctaaagaagaaagggaaacacctactactgctagtatgccgccattagtgcgacaagtttgggaattaaaggatcaccaaggtgcagagccagccttcttattcggccttgaattgatcatatgcggattagaaaaacaacttaaatgcgaaagtgggtcttaa

SEQ ID NO: 507 - DNA, 627 bp, Artificial Sequence
  synthetic construct; Sulfonylurea responsive repressor
  misc_feature (418)..(419): n is a, c, g, or t
atgggatctagattagataaaagtaaagtgattaacagcgcattagagctgcttaatgaggtcggaatcgaaggtttaacaacccgtaaactcgcccagaagctaggtgtagagcagcctacattgtattggcatgtaaaaaataagcgagctctgctcgacgccttagccattgagatgatggataggcaccaaactcactattgccctttagaaggggaaagctggcaagattttttacgtaatactgctaaaagtatgagatgtgctttactaagccatcgcgatggagcaaaagtatgtttaggtacacgctggacagaacaaatgtatgaagctgctgaaaatatgttagcctttttatgccaacaaggtttttcactagagaatgcattatatgcaatgagtgctgtgaggnngtttactttaggttgcgtattgtttgatcaagagagccaagtcgctaaagaagaaagggaaacacctactactgctagtatgccgccattagtgcgacaagcttgggaattaaaggatcaccaaggtgcagagccagccttcttattcggccttgaattgatcatatgcggattagaaaaacaacttaaatgcgaaagtgggtcttaa

SEQ ID NO: 508 - DNA, 627 bp, Artificial Sequence
  synthetic construct; Sulfonylurea responsive repressor
  misc_feature (219)..(219): n is a, c, g, or t
  misc_feature (337)..(337): n is a, c, g, or t
  misc_feature (418)..(418): n is a, c, g, or t
atgggatctagattagataaaagtaaagtgattaacagcgcattagagctgcttaatgaggtcggaatcgaaggtttaacaacccgtaaactcgcccagaagctaggtgtagagcagcctacattgtattggcatgtaaaaaataagcgagctctgctcgacgccttagccattgagatgatggataggcacgcaactcactattgccctttagaaggngaaagctggcaagattttttacgtaataatgctaaaagtatgagatgtgctttactaagccatcgcgatggagcaaaagtatgtttaggtacacgctggacagaacaactgtatgaanctgctgaaaatcaattagcctttttatgccaacaaggtttttcactagagaatgcattatatgcaatgagtgctgtgaggnwgtttactttaggttgcgtattgtttgatcaagagagccaagtcgctaaagaagaaagggaaacacctactactgctagtatgccgccattagtgcgacaaggttgggaattaaaggatcaccaaggtgcagagccagccttcttattcggccttgaattgatcatatgcggattagaaaaacaacttaaatgcgaaagtgggtcttaa

SEQ ID NO: 509 - DNA, 627 bp, Artificial Sequence
  synthetic construct; Sulfonylurea responsive repressor
atgggatctagattagataaaagtaaagtgattaacagcgcattagagctgcttaatgaggtcggaatcgaaggtttaacaacccgtaaactcgcccagaagctaggtgtagagcagcctacattgtattggcatgtaaaaaataagcgagctctgctcgacgccttagccattgagatgatggataggcaccaaactcactattgccctttagaaggggaaagctggcaagattttttacgtaatactgctaaaagtatgagatgtgctttactaagccatcgcgatggagcaaaagtatgtttaggtacacgctggacagaaaaacaatatgaaagtgctgaaaatcaattagcctttttatgccaacaaggtttttcactagagaatgcattatatgcaatgagtgctgtgagggtgtttactttaggttgcgtattgtttgatcaagagagccaagtcgctaaagaagaaagggaaacacctactactgctagtatgccgccattagtgcgacaaggttgggaattaaaggatcaccaaggtgcagagccagccttcttattcggccttgaattgatcatatgcggattagaaaaacaacttaaatgcgaaagtgggtcttaa

SEQ ID NO: 510 - DNA, 627 bp, Artificial Sequence
  synthetic construct; Sulfonylurea responsive repressor
atgggatctagattagataaaagtaaagtgattaacagcgcattagagctgcttaatgaggtcggaatcgaaggtttaacaacccgtaaactcgcccagaagctaggtgtagagcagcctacattgtattggcatgtaaaaaataagcgagctctgctcgacgccttagccattgagatgatggataggcaccaaactcactattgccctttagaaggggaaagctggcaagattttttacgtaataatgctaaaagtatgagatgtgctttactaagccatcgcgatggagcaaaagtatgtttaggtacacgctggacagaacaacattatgaagctgctgaaaatcaattagcctttttatgccaacaaggtttttcactagagaatgcattatatgcagtgagtgctgtgagggtgtttactttaggttgcgtattgtttgatcaagagagccaagtcgctaaagaagaaagggaaacacctactactgctagtatgccgccattagtgcgacaagtttgggaattaaaggatcaccaaggtgcagagccagccttcttattcggccttgaattgatcatatgcggattagaaaaacaacttaaatgcgaaagtgggtcttaa

SEQ ID NO: 511 - DNA, 627 bp, Artificial Sequence
  synthetic construct; Sulfonylurea responsive repressor
atgggatctagattagataaaagtaaagtgattaacagcgcattagagctgcttaatgaggtcggaatcgaaggtttaacaacccgtaaactcgcccagaagctaggtgtagagcagcctacattgtattggcatgtaaaaaataagcgagctctgctcgacgccttagccattgagatgatggataggcacgcaactcactattgccctttagaaggggaaagctggcaagattttttacgtaatactgctaaaagtatgagatgtgctttactaagccatcgcgatggagcaaaagtatgtttaggtacacgctggacagaacaacattatgaaagtgctgaaaatatgttagcctttttatgccaacaaggtttttcactagagaatgcattatatgcagtgagtgctgtgagggtgtttactttaggttgcgtattgtttgatcaagagagccaagtcgctaaagaagaaagggaaacacctactactgctagtatgccgccattagtgcgacaagcttgggaattaaaggttcaccaaggtgcagagccagccttcttattcggccttgaattgatcatatgcggattagaaaaacaacttaaatgcgaaagtgggtcttaa

SEQ ID NO: 512 - DNA, 627 bp, Artificial Sequence
  synthetic construct; Sulfonylurea responsive repressor
atgggatctagattagataaaagtaaagtgattaacagcgcattagagctgcttaatgaggtcggaatcgaaggtttaacaacccgtaaactcgcccagaagctaggtgtagagcagcctacattgtattggcatgtaaaaaataagcgagctctgctcgacgccttagccattgagatgatggataggcacgcaactcactattgccctttagaaggggaaagctggcaagattttttacgtaataatgctaaaagtatgagatgtgctttactaagccatcgcgatggagcaaaagtatgtttaggtacacgctggacagaacaacattatgaaagtgctgaaaatcaattagcctttttatgccaacaaggtttttcactagagaatgcattatatgcagtgagtgctgtgagggtgtttactttaggttgcgtattgtttgatcaagagctccaagtcgctaaagaagaaagggaaacacctactactgctagtatgccgccattattgcgacaagtttgggaattaaaggatcaccaaggtgcagagccagccttcttattcggccttgaattgatcatatgcggattagaaaaacaacttaaatgcgaaagtgggtcttaa

SEQ ID NO: 513 - DNA, 627 bp, Artificial Sequence
  synthetic construct; Sulfonylurea responsive repressor
atgggatctagattagataaaagtaaagtgattaacagcgcattagagctgcttaatgaggtcggaatcgaaggtttaacaacccgtaaactcgcccagaagctaggtgtagagcagcctacattgtattggcatgtaaaaaataagcgagctctgctcgacgccttagccattgagatgatggataggcacgcaactcactattgccctttagaaggggaaagctggcaagattttttacgtaatactgctaaaagtatgagatgtgctttactaagccatcgcgatggagcaaaagtatgtttaggtacacgctggacagaaaaacaatatgaagctgctgaaaatcaattagcctttttatgccaacaaggtttttcactagagaatgcattatatgcagtgagtgctgtggggaactttactttaggttgcgtattgtttgatcaagagctccaagtcgctaaagaagaaagggaaacacctactactgctagtatgccgccattagtgcgacaagctttggaattaaaggatcaccaaggtgcagagccagccttcttattcggccttgaattgatcatatgcggattagaaaaacaacttaaatgcgaaagtgggtcttaa

SEQ ID NO: 514 - DNA, 627 bp, Artificial Sequence
  synthetic construct; Sulfonylurea responsive repressor
atgggatctagattagataaaagtaaagtgattaacagcgcattagagctgcttaatgaggtcggaatcgaaggtttaacaacccgtaaactcgcccagaagctaggtgtagagcagcctacattgtattggcatgtaaaaaataagcgagctctgctcgacgccttagccattgagatgatggataggcacgcaactcactattgccctttagaaggggaaagctggcaagattttttacgtaatactgctaaaagtatgagatgtgctttactaagccatcgcgatggagcaaaagtatgtttaggtacacgctggacagaacaacaatatgaaactgctgaaaatcaattagcctttttatgccaacaaggtttttcactagagaatgcattatatgcaatgagtgctgtgaggaactttactttaggttgcgtattgtttgatcaagagagccaagtcgctaaagaagaaagggaaacacctactactgctagtatgccgccattattgcgacaagcttgggaattaaaggatcaccaaggtgcagagccagccttcttattcggccttgaattgatcatatgcggattagaaaaacaacttaaatgcgaaagtgggtcttaa

SEQ ID NO: 515 - DNA, 627 bp, Artificial Sequence
  synthetic construct; Sulfonylurea responsive repressor
  misc_feature (200)..(200): n is a, c, g, or t
  misc_feature (314)..(314): n is a, c, g, or t
  misc_feature (368)..(368): n is a, c, g, or t
  misc_feature (413)..(413): n is a, c, g, or t
  misc_feature (437)..(437): n is a, c, g, or t
  misc_feature (458)..(458): n is a, c, g, or t
  misc_feature (542)..(542): n is a, c, g, or t
atgggatctagattagataaaagtaaagtgattaacagcgcattagagctgcttaatgaggtcggaatcgaaggtttaacaacccgtaaactcgcccagaagctaggtgtagagcagcctacattgtattggcatgtaaaaaataagcgagctctgctcgacgccttagccattgagatgatggataggcacgcaactcnctattgccctttagaaggggaaagctggcaagattttttacgtaataatgctaaaagtatgagatgtgctttactaagccatcgcgatggagcaaaagtatgtttaggtacacnctggacagaaaaacattatgaaactgctgaaaatcaattagcctttttatgccnacaaggtttttcactagagaatgcattatatgcaatgagtgctgngagggtgtttactttaggttgcgnattgtttgatcaagagctccnagtcgctaaagaagaaagggaaacacctactactgctagtatgccgccattattgcgacaaggttgggaattaaaggatcaccnaggtgcagagccagccttcttattcggccttgaattgatcatatgcggattagaaaaacaacttaaatgcgaaagtgggtcttaa

SEQ ID NO: 516 - DNA, 627 bp, Artificial Sequence
  synthetic construct; Sulfonylurea responsive repressor
atgggatctagattagataaaagtaaagtgattaacagcgcattagagctgcttaatgaggtcggaatcgaaggtttaacaacccgtaaactcgcccagaagctaggtgtagagcagcctacattgtattggcatgtaaaaaataagcgagctctgctcgacgccttagccattgagatgatggataggcaccaaactcacttgtgccctttagaaggggaaagctggcaagattttttacgtaatactgctaaaagtatgagatgtgctttactaagccatcgcgatggagcaaaagtatgtttaggtacacsctggacagaaaaaatgtatgaaagtgctgaaaatatgttagcctttttatgccaacaaggtttttcactagagaatgcattatatgcagtgagtgctgtgagggtgtttactttaggttgcgtattgtttgatcaagagctccaagtcgctaaagaagaaagggaaacacctactactgctagtatgccgccattattgcgacaagtttgggaattaaaggatcaccaaggtgcagagccagccttcttattcggccttgaattgatcatatgcggattagaaaaacaacttaaatgcgaaagtgggtcttaa

SEQ ID NO: 517 - DNA, 627 bp, Artificial Sequence
  synthetic construct; Sulfonylurea responsive repressor
atgggatctagattagataaaagtaaagtgattaacagcgcattagagctgcttaatgaggtcggaatcgaaggtttaacaacccgtaaactcgcccagaagctaggtgtagagcagcctacattgtattggcatgtaaaaaataagcgagctctgctcgacgccttagccattgagatgatggataggcaccaaactcacatgtgccctttagaaggggaaagctggcaagattttttacgtaataatgctaaaagtatgagatgtgctttactaagccatcgcgatggagcaaaagtatgtttaggtacacgctggacagaaaaaatgtatgaaagtgctgaaaatatgttagcctttttatgccaacaaggtttttcactagagaatgcattatatgcaatgagtgctgtgagggtgtttactttaggttgcgtattgtttgatcaagagagccaagtcgctaaagaagaaagggaaacacctactwctrctagtatgycgccattagtgcgacaagcttgggaattaaaggatcaccaaggtgcagagccagccttcttattcggccttgaattgatcatatgcggattagaaaaacaacttaaatgcgaaagtgggtcttaa

SEQ ID NO: 518 - DNA, 627 bp, Artificial Sequence
  synthetic construct; Sulfonylurea responsive repressor
atgggatctagattagataaaagtaaagtgattaacagcgcattagagctgcttaatgaggtcggaatcgaaggtttaacaacccgtaaactcgcccagaagctaggtgtagagcagcctacattgtattggcatgtaaaaaataagcgagctctgctcgacgccttagccattgagatgatggataggcacgcaactcacatttgccctttagaaggggaaagctggcaagattttttacgtaatactgctaaaagtatgagatgtgctttactaagccatcgcgatggagcaaaagtatgtttaggtacacgctggacagaacaacattatgaaagtgctgaaaatcaattagcctttttatgccaacaaggtttttcactagagaatgcattatatgcagtgagtgctgtgagggtgtttactttaggttgcgtattgtttgatcaagagagccaagtcgctaaagaagaaagggaaacacctactactgctagtatgccgccattattgcgacaagtttgggaattaaaggatcaccaaggtgcagagccagccttcttattcggccttgaattgatcatatgcggattagaaaaacaacttaaatgcgaaagtgggtcttaa

SEQ ID NO: 519 - DNA, 627 bp, Artificial Sequence
  synthetic construct; Sulfonylurea responsive repressor
  misc_feature (303)..(303): n is a, c, g, or t
  misc_feature (329)..(330): n is a, c, g, or t
  misc_feature (512)..(512): n is a, c, g, or t
atgggatctagattagataaaagtaaagtgattaacagcgcattagagctgcttaatgaggtcggaatcgaaggtttaacaacccgtaaactcgcccagaagctaggtgtagagcagcctacattgtattggcatgtaaaaaataagcgagctctgctcgacgccttagccattgagatgatggataggcaccaaactcactattgccctttagaaggggaaagctggcaagattttttacgtaatactgctaaaagtatgagatgtgctttactaagccatcgcgatggagcaaaagtatgnttaggtacacgctggacagaaaaacnntatgaagstgctgaaaatcaattagcctttttatgccaacaaggtttttcactagagaatgcattatatgcaatsagtgctgtgagggtgtttactttaggttgcgtattgtttgatcaagagagccaagtcgctaaagaagaaagggaaacacctactactgctagtatgccgccattagnscgacaagkttgggaattaaaggatcaccaaggtgcagagccagccttcttattcggccttgaattgatcatatgcggattagaaaaacaacttaaatgcgaaagtgggtcttaa

SEQ ID NO: 520 - DNA, 627 bp, Artificial Sequence
  synthetic construct; Sulfonylurea responsive repressor
  misc_feature (194)..(194): n is a, c, g, or t
  misc_feature (204)..(204): n is a, c, g, or t
  misc_feature (418)..(419): n is a, c, g, or t
  misc_feature (521)..(521): n is a, c, g, or t
atgggatctagattagataaaagtaaagtgattaacagcgcattagagctgcttaatgaggtcggaatcgaaggtttaacaacccgtaaactcgcccagaagctaggtgtagagcagcctacattgtattggcatgtaaaaaataagcgagctctgctcgacgccttagccattgagatgatggataggcaccnaactcactantgccctttagaaggggaaagctggcaagattttttacgtaatactgctaaaagtatgagatgtgctttactaagccatcgcgatggagcaaaagtatgtttaggtacacgctggacagaacaacattatgaagctgctgaaaatctgttagcctttttatgccaacaaggtttttcactagagaatgcattatatgcaatgagtgctgtgaggnngtttactttaggttgcgtattgtttgatcaagagctccaagtcgctaaagaagaaagggaaacacctactactgctagtatkccgccattagtgcgacaagnttgggaattaaaggatcaccaaggtgcagagccagccttcttattcggccttgaattgatcatatgcggattagaaaaacaacttaaatgcgaaagtgggtcttaa

SEQ ID NO: 521 - DNA, 627 bp, Artificial Sequence
  synthetic construct; Sulfonylurea responsive repressor
atgggatctagattagataaaagtaaagtgattaacagcgcattagagctgcttaatgaggtcggaatcgaaggtttaacaacccgtaaactcgcccagaagctaggtgtagagcagcctacattgtattggcatgtaaaaaataagcgagctctgctcgacgccttagccattgagatgatggataggcacgcaactcacgtttgccctttagaaggggaaagctggcaagattttttacgtaataatgctaaaagtatgagatgtgctttactaagccatcgcgatggagcaaaagtatgtttaggtacacgctggacagaacaacaatatgaaactgctgaaaatatgttagcctttttatgccaacaaggtttttcactagagaatgcattatatgcagtgagtgctgtgaggaactttactttaggttgcgtattgtttgatcaagagagccaagtcgctaaagaagaaagggaaacacctactactgctagtatgccgccattattgcgacaaggttgggaattaaaggatcaccaaggtgcagagccagccttcttattcggccttgaattgatcatatgcggattagaaaaacaacttaaatgcgaaagtgggtcttaa

SEQ ID NO: 522 - DNA, 627 bp, Artificial Sequence
  synthetic construct; Sulfonylurea responsive repressor
atgggatctagattagataaaagtaaagtgattaacagcgcattagagctgcttaatgaggtcggaatcgaaggtttaacaacccgtaaactcgcccagaagctaggtgtagagcagcctacattgtattggcatgtaaaaaataagcgagctctgctcgacgccttagccattgagatgatggataggcacgcaactcactattgccctttagaaggggaaagctggcaagattttttacgtaataatgctaaaagtatgagatgtgctttactaagccatcgcgatggagcaaaagtatgtttaggtacacgctggacagaacaacattatgaaactgctgaaaatatgttagcctttttatgccaacaaggtttttcactagagaatgcattatatgcagtgagtgctgtgaggaactttactttaggttgcgtattgtttgatcaagagctccaagtcgctaaagaagaaagggaaacacctactactgctagtatgccgccattagtgcgacaagcttgggaattaaaggatcaccaaggtgcagagccagccttcttattcggccttgaattgatcatatgcggattagaaaaacaacttaaatgcgaaagtgggtcttaa

SEQ ID NO: 523 - DNA, 627 bp, Artificial Sequence
  synthetic construct; Sulfonylurea responsive repressor
atgggatctagattagataaaagtaaagtgattaacagcgcattagagctgcttaatgaggtcggaatcgaaggtttaacaacccgtaaactcgcccagaagctaggtgtagagcagcctacattgtattggcatgtaaaaaataagcgagctctgctcgacgccttagccattgagatgatggataggcaccaaactcacttttgccctttagaaggggaaagctggcaagattttttacgtaataatgctaaaagtatgagatgtgctttactaagccatcgcgatggagcaaaagtatgtttaggtacacgctggacagaacaaatgtatgaaactgctgaaaatatgttagcctttttatgccaacaaggtttttcactagagaatgcattatatgcaatgagtgctgtgagggtgtttactttaggttgcgtattgtttgatcaagagagccaagtcgctaaagaagaaagggaaacacctactactgctagtatgcccccattagtgcgacaaggttgggaattaaaggatcaccaaggtgcagagccagccttcttattcggccttgaattgatcatatgcggattagaaaaacaacttaaatgcgaaagtgggtcttaa

SEQ ID NO: 524 - DNA, 627 bp, Artificial Sequence
  synthetic construct; Sulfonylurea responsive repressor
atgggatctagattagataaaagtaaagtgattaacagcgcattagagctgcttaatgaggtcggaatcgaaggtttaacaacccgtaaactcgcccagaagctaggtgtagagcagcctacattgtattggcatgtaaaaaataagcgagctctgctcgacgccttagccattgagatgatggataggcacgcaactgactattgccctttagaaggggaaagctggcaagattttttacgtaataatgctaaaagtatgagatgtgctttactaagccatcgcgatggagcaaaagtatgtttaggtacacgctggacagaaaaacaatatgaaactgctgaaaatatgttagcctttttatgccaacaaggtttttcactagagaatgcattatatgcagtgagtgctgtgagggtgtttactttaggttgcgtattgtttgatcaagagagccaagtcgctwaagaagaaagggaaacacctmctactgctagtatrccgccattagtgcgacaagtttgggaattaaaggatcaccaaggtgcagagccagccttcttattcggccttgaattgatcatatgcggattagaaaaacaacttaaatgcgaaagtgggtcttaa

SEQ ID NO: 525 - DNA, 627 bp, Artificial Sequence
  synthetic construct; Sulfonylurea responsive repressor
atgggatctagattagataaaagtaaagtgattaacagcgcattagagctgcttaatgaggtcggaatcgaaggtttaacaacccgtaaactcgcccagaagctaggtgtagagcagcctacattgtattggcatgtaaaaaataagcgagctctgctcgacgccttagccattgagatgatggataggcaccaaactcactattgccctttagaaggggaaagctggcaagattttttacgtaataatgctaaaagtatgagatgtgctttactaagccatcgcgatggagcaaaagtatgtttaggtacacgctggacagaacaattgtatgaaactgctgaaaatcaattagcctttttatgccaacaaggtttttcactagagaatgcattatatgcaatgagtgctgtgagggtgtttactttaggttgcgtattgtttgatcaagagagccaagtcgctaaagaagaaagggaaacacctactactgctagtatgccgccattagtgcgacaagcttgggaattaaaggatcaccaaggtgcagagccagccttcttattcggccttgaattgatcatatgcggattagaaaaacaacttaaatgcgaaagtgggtcttaa

SEQ ID NO: 526 - DNA, 627 bp, Artificial Sequence
  synthetic construct; Sulfonylurea responsive repressor
atgggatctagattagataaaagtaaagtgattaacagcgcattagagctgcttaatgaggtcggaatcgaaggtttaacaacccgtaaactcgcccagaagctaggtgtagagcagcctacattgtattggcatgtaaaaaataagcgagctctgctcgacgccttagccattgagatgatggataggcaccaaactcacgtgtgccctttagaaggggaaagctggcaagattttttacgtaataatgctaaaagtatgagatgtgctttactaagccatcgcgatggagcaaaagtatgtttaggtacacgctggacagaacaacattatgaagctgctgaaaatatgttagcctttttatgccaacaaggtttttcactagagaatgcattatatkcaatgagtgctgtgagggtgtttactttaggttgcgtattgtttgatcaagagctccaagtcgctaaagaagaaagggaaacacctactactgctagtatgccgccattagtgcgacaagcttgggaattaaaggatcaccaaggtgcagagccagccttcttattcggccttgaattgatcatatgcggattagaaaaacaacttaaatgcgaaagtgggtcttaa

SEQ ID NO: 527 - DNA, 627 bp, Artificial Sequence
  synthetic construct; Sulfonylurea responsive repressor
atgggatctagattagataaaagtaaagtgattaacagcgcattagagctgcttaatgaggtcggaatcgaaggtttaacaacccgtaaactcgcccagaagctaggtgtagagcagcctacattgtattggcatgtaaaaaataagcgagctctgctcgacgccttagccattgagatgatggataggcaccaaactcacttttgccctttagaaggggaaagctggcaagattttttacgtaataatgctaaaagtatgagatgtgctttactaagccatcgcgatggagcaaaagtatgtttaggtacacgctggacagaacaacaatatgaaagtgctgaaaatcaattagcctttttatgccaacaaggtttttcactagagaatgcattatatgcaatgagtgctgtgagggtgtttactttaggttgcgtattgtttgatcaagagagccaagtcgctaaagaagaaagggaaacacctactactgctagtatgccgccattattgcgacaaggtttggaattaaaggatcaccaaggtgcagagccagccttcttattcggccttgaattgatcatatgcggattagaaaaacaacttaaatgcgaaagtgggtcttaa

SEQ ID NO: 528 - DNA, 627 bp, Artificial Sequence
  synthetic construct; Sulfonylurea responsive repressor
atgggatctagattagataaaagtaaagtgattaacagcgcattagagctgcttaatgaggtcggaatcgaaggtttaacaacccgtaaactcgcccagaagctaggtgtagagcagcctacattgtattggcatgtaaaaaataagcgagctctgctcgacgccttagccattgagatgatggataggcaccaaactcacttgtgccctttagaaggggaaagctggcaagattttttacgtaataatgctaaaagtatgagatgtgctttactaagccatcgcgatggagcaaaagtatgtttaggtacacgctggacagaacaattgtatgaaactgctgaaaatatgttagcctttttatgccaacaaggtttttcactagagaatgcattatatgcaatgagtgctgtgagggtgtttactttaggttgcgtattgtttgatcaagagagccaagtcgctaaagaagaaagggaaacacctactactgctagtatgccgccattattgcgacaaggttgggaattaaaggatcaccaaggtgcagagccagccttcttattcggccttgaattgatcatatgcggattagaaaaacaacttaaatgcgaaagtgggtcttaa

SEQ ID NO: 529 - DNA, 627 bp, Artificial Sequence
  synthetic construct; Sulfonylurea responsive repressor
atgggatctagattagataaaagtaaagtgattaacagcgcattagagctgcttaatgaggtcggaatcgaaggtttaacaacccgtaaactcgcccagaagctaggtgtagagcagcctacattgtattggcatgtaaaaaataagcgagctctgctcgacgccttagccattgagatgatggataggcaccaaactcactattgccctttagaaggggaaagctggcaagattttttacgtaatactgctaaaagtatgagatgtgctttactaagccatcgcgatggagcaaaagtatgtttaggtacacgctggacagaaaaattgtatgaaactgctgaaaatatgttagcctttttatgccaacaaggtttttcactagagaatgcattatatgcaatgagtgctgtgagggtgtttactttaggttgcgtattgtttgatcaagagagccaagtcgctaaagaagaaagggaaacacctactactgctagtatgccgccattattgcgacaagcttgggaattaaaggatcaccaaggtgcagagccagccttcttattcggccttgaattgatcatatgcggattagaaaaacaacttaaatgcgaaagtgggtcttaa

SEQ ID NO: 530 - DNA, 627 bp, Artificial Sequence
  synthetic construct; Sulfonylurea responsive repressor
atgggatctagattagataaaagtaaagtgattaacagcgcattagagctgcttaatgaggtcggaatcgaaggtttaacaacccgtaaactcgcccagaagctaggtgtagagcagcctacattgtattggcatgtaaaaaataagcgagctctgctcgacgccttagccattgagatgatggataggcaccaaactcactattgccctttagaaggggaaagctggcaagattttttacgtaataatgctaaaagtatgagatgtgctttactaagccatcgcgatggagcaaaagtatgtttaggtacacgctggacagaaaaacaatatgaaactgctgaaaatatgttagcctttttatgccaacaaggtttttcactagagaatgcattatatgcaatgagtgctgtgagggtgtttactttaggttgcgtattgtttgatcaagagctccaagtcgctaaagaagaaagggaaacacctactactgctagtatgccgccattattgcgacaagtttgggaattaaaggatcaccaaggtgcagagccagccttcttattcggccttgaattgatcatatgcggattagaaaaacaacttaaatgcgaaagtgggtcktaa

SEQ ID NO: 531 - DNA, 627 bp, Artificial Sequence
  synthetic construct; Sulfonylurea responsive repressor
atgggatctagattagataaaagtaaagtgattaacagcgcattagagctgcttaatgaggtcggaatcgaaggtttaacaacccgtaaactcgcccagaagctaggtgtagagcagcctacattgtattggcatgtaaaaaataagcgagctctgctcgacgccttagccattgagatgatggataggcaccaaactcactattgccctttagaaggggaaagctggcaagattttttacgtaatactgctaaaagtatgagatgtgctttactaagccatcgcgatggagcaaaagtatgtttaggtacacgctggacagaacaaatgtatgaaagtgctgaaaatcaattagcctttttatgccaacaaggtttttcactagagaatgcattatatgcagtgagtgctgtgagggtgtttactttaggttgcgtattgtttgatcaagagctccaagtcgctaaagaagaaagggaaacacctactactgctagtatgccgccattattgcgacaagcttgggaattaaaggatcaccaaggtgcagagccagccttcttattcggccttgaattgatcatatgcggattagaaaaacaacttaaatgcgaaagtgggtcttaa

SEQ ID NO: 532 - DNA, 627 bp, Artificial Sequence
  synthetic construct; Sulfonylurea responsive repressor
atgggatctagattagataaaagtaaagtgattaacagcgcattagagctgcttaatgaggtcggaatcgaaggtttaacaacccgtaaactcgcccagaagctaggtgtagagcagcctacattgtattggcatgtaaaaaataagcgagctctgctcgacgccttagccattgagatgatggataggcaccaaactcactattgccctttagaaggggaaagctggcaagattttttacgtaatactgctaaaagtatgagatgtgctttactaagccatcgcgatggagcaaaagtatgtttaggtacacgctggacagaaaaacaatatgaaactgctgaaaatatgttagcctttttatgccaacaaggtttttcactagagaatgcattatatgcaatgagtgctgtgagggtgtttactttaggttgcgtattgtttgatcaagagagccaagtcgctaaagaagaaagggaaacacctactactgctagtatgccgccattattgcgacaaggttgggaattaaaggatcaccaaggtgcagagccagccttcttattcggccttgaattgatcatatgcggattagaaaaacaacttaaatgcgaaagtgggtcttaa

SEQ ID NO: 533 - DNA, 627 bp, Artificial Sequence; identical to SEQ ID NO: 505
  synthetic construct; Sulfonylurea responsive repressor

SEQ ID NO: 534 - DNA, 627 bp, Artificial Sequence
  synthetic construct; Sulfonylurea responsive repressor
atgggatctagattagataaaagtaaagtgattaacagcgcattagagctgcttaatgaggtcggaatcgaaggtttaacaacccgtaaactcgcccagaagctaggtgtagagcagcctacattgtattggcatgtaaaaaataagcgagctctgctcgacgccttagccattgagatgatggataggcaccaaactcactattgccctttagaaggggaaagctggcaagattttttacgtaataatgctaaaagtatgagatgtgctttactaagccatcgcgatggagcaaaagtatgtttaggtacacgctggacagaaaaacaatatgaaagtgctgaaaatatgttagcctttttatgccaacaaggtttttcactagagaatgcattatatgcagtgagtgctgtgagggtgtttactttaggttgcgtattgtttgatcaagagagccaagtcgctaaagaagaaagggaaacacctactactgctagtatgccgccattattgcgacaagcttgggaattaaaggatcaccaaggtgcagagccagccttcttattcggccttgaattgatcatatgcggattagaaaaacaacttaaatgcgaaagtgggtcttaa

SEQ ID NO: 535 - DNA, 627 bp, Artificial Sequence
  synthetic construct; Sulfonylurea responsive repressor
atgggatctagattagataaaagtaaagtgattaacagcgcattagagctgcttaatgaggtcggaatcgaaggtttaacaacccgtaaactcgcccagaagctaggtgtagagcagcctacattgtattggcatgtaaaaaataagcgagctctgctcgacgccttagccattgagatgatggataggcaccaaactcacttgtgccctttagaaggggaaagctggcaagattttttacgtaataatgctaaaagtatgagatgtgctttactaagccatcgcgatggagcaaaagtatgtttaggtacacgctggacagaacaattgtatgaaagtgctgaaaatcaattagcctttttatgccaacaaggtttttcactagagaatgcattatatgcagtgagtgctgtgagggtgtttactttaggttgcgtattgtttgatcaagagagccaagtcgctaaagaagaaagggaaacacctactactgctagtatgccgccattattgcgacaagcttgggaattaaaggatcaccaaggtgcagagccagccttcttattcggccttgaattgatcatatgcggattagaaaaacaacttaaatgcgaaagtgggtcttaa

SEQ ID NO: 536 - DNA, 627 bp, Artificial Sequence
  synthetic construct; Sulfonylurea responsive repressor
atgggatctagattagataaaagtaaagtgattaacagcgcattagagctgcttaatgaggtcggaatcgaaggtttaacaacccgtaaactcgcccagaagctaggtgtagagcagcctacattgtattggcatgtaaaaaataagcgagctctgctcgacgccttagccattgagatgatggataggcacgcaactcacttgtgccctttagaaggggaaagctggcaagattttttacgtaataatgctaaaagtatgagatgtgctttactaagccatcgcgatggagcaaaagtatgtttaggtacacgctggacagaaaaacaatatgaaactgctgaaaatatgttagcctttttatgccaacaaggtttttcactagagaatgcattatatgcagtgagtgctgtgagggtgtttactttaggttgcgtattgtttgatcaagagagccaagtcgctaaagaagaaagggaaacacctactactgctagtatgccgccattattgcgacaagtttgggaattaaaggatcaccaaggtgcagagccagccttcttattcggccttgaattgatcatatgcggattagaaaaacaacttaaatgcgaaagtgggtcttaa

SEQ ID NO: 537 - DNA, 627 bp, Artificial Sequence
  synthetic construct; Sulfonylurea responsive repressor
atgggatctagattagataaaagtaaagtgattaacagcgcattagagctgcttaatgaggtcggaatcgaaggtttaacaacccgtaaactcgcccagaagctaggtgtagagcagcctacattgtattggcatgtaaaaaataagcgagctctgctcgacgccttagccattgagatgatggataggcacgcaactcacttttgccctttagaaggggaaagctggcaagattttttacgtaataatgctaaaagtatgagatgtgctttactaagccatcgcgatggagcaaaagtatgtgtaggtacacgctggacagaacaaatgtatgaagctgctgaaaatcaattagcctttttatgccaacaaggtttttcactagagaatgcattatatgcagtgagtgctgtgagggtgtttactttaggttgcgtattgtttgatcaagagctccaagtcgctaaagaagaaagggaaacacctactactrctagtatkccgccattagtgcgacaagcttgggaattaaaggatcaccaaggtgcagagccagccttcttattcggccttgaattgatcatatgcggattagaaaaacaacttaaatgcgaaagtgggtcttaa

SEQ ID NO: 538 - DNA, 627 bp, Artificial Sequence
  synthetic construct; Sulfonylurea responsive repressor
atgggatctagattagataaaagtaaagtgattaacagcgcattagagctgcttaatgaggtcggaatcgaaggtttaacaacccgtaaactcgcccagaagctaggtgtagagcagcctacattgtattggcatgtaaaaaataagcgagctctgctcgacgccttagccattgagatgatggataggcaccaaactcacatttgccctttagaaggggaaagctggcaagattttttacgtaataatgctaaaagtatgagatgtgctttactaagccatcgcgatggagcaaaagtatgtgtaggtacacgctggacagaaaaacattatgaaagtgctgaaaatatgttagcctttttatgccaacaaggtttttcactagagaatgcattatatgcagtgagtgctgtgagggtgtttactttaggttgcgtattgtttgatcaagagagccaagtcgctaaagaagaaagggaaacacctactactgctagtatgccgccattattgcgacaagcttgggaattaaaggatcaccaaggtgcagagccagccttcttattcggccttgaattgatcatatgcggattagaaaaacaacttaaatgcgaaagtgggtcttaa

SEQ ID NO: 539 - DNA, 627 bp, Artificial Sequence
  synthetic construct; Sulfonylurea responsive repressor
  misc_feature (303)..(303): n is a, c, g, or t
  misc_feature (349)..(349): n is a, c, g, or t
  misc_feature (418)..(418): n is a, c, g, or t
  misc_feature (454)..(454): n is a, c, g, or t
  misc_feature (524)..(524): n is a, c, g, or t
atgggatctagattagataaaagtaaagtgattaacagcgcattagagctgcttaatgaggtcggaatcgaaggtttaacaacccgtaaactcgcccagaagctaggtgtagagcagcctacattgtattggcatgtaaaaaataagcgagctctgctcgacgccttagccattgagatgatggataggcacgcaactcacttttgccctttagaaggggaaagctggcaagattttttacgtaataatgctaaaagtatgagatgtgctttactaagccatcgcgatggagcaaaagtatgnttaggtacacgctggacagaacaactgtatgaaactgctgaaaatntgttagcctttttatgccaacaaggtttttcactagagaatgcattatatgcaatgagtgctgtgaggnwctttactttaggttgcgtattgtttgatcaagagntccaagtcgctaaagaagaaagggaaacacctactactgctagtatgccgccattattgcgacaagtttnggaattaaaggatcaccaaggtgcagagccagccttcttattcggccttgaattgatcatatgcggattagaaaaacaacttaaatgcgaaagtgggtcttaa

SEQ ID NO: 540 - DNA, 627 bp, Artificial Sequence
  synthetic construct; Sulfonylurea responsive repressor
atgggatctagattagataaaagtaaagtgattaacagcgcattagagctgcttaatgaggtcggaatcgaaggtttaacaacccgtaaactcgcccagaagctaggtgtagagcagcctacattgtattggcatgtaaaaaataagcgagctctgctcgacgccttagccattgagatgatggataggcacgcaactcacgtgtgccctttagaaggggaaagctggcaagattttttacgtaatactgctaaaagtatgagatgtgctttactaagccatcgcgatggagcaaaagtatgtttaggtacacgctggacagaacaacattatgaaactgctgaaaatatgttagcctttttatgccaacaaggtttttcactagagaatgcattatatgcaatgagtgctgtgagggtgtttactttaggttgcgtattgtttgatcaagagagccaagtcgctaaagaagaaagggaaacacctactactgctagtatgccgccattattgcgacaagtttgggaattaaaggatcaccaaggtgcagagccagccttcttattcggccttgaattgatcatatgcggattagaaaaacaacttaaatgcgaaagtgggtcttaa

SEQ ID NO: 541 - DNA, 627 bp, Artificial Sequence
  synthetic construct; Sulfonylurea responsive repressor
  misc_feature (203)..(203): n is a, c, g, or t
  misc_feature (512)..(512): n is a, c, g, or t
atgggatctagattagataaaagtaaagtgattaacagcgcattagagctgcttaatgaggtcggaatcgaaggtttaacaacccgtaaactcgcccagaagctaggtgtagagcagcctacattgtattggcatgtaaaaaataagcgagctctgctcgacgccttagccattgagatgatggataggcacccaactcactnktgccctttagaaggggaaagctggcaagattttttacgtaatactgctaaaagtatgagatgtgctttactaagccatcgcgatggagcaaaagtatgtttaggtacacgctggacagaacaattgtatgaaactgctgaaaatatgttagcctttttatgccaacaaggtttttcactagagaatgcattatatgcaatgagtgctgtgaggaastttactttaggttgcgtattgtttgatcaagagatccaagtcgctaaagaagaaagggaaacacctactactgctagtatgcccccattagnccgacaagcttgggaattaaaggatcaccaaggtgcagagccagccttcttattcggccttgaattgatcatatgcggattagaaaaacaacttaaatgcgaaagtgggtcttaa

SEQ ID NO: 542 - DNA, 627 bp, Artificial Sequence
  synthetic construct; Sulfonylurea responsive repressor
  misc_feature (454)..(454): n is a, c, g, or t
  misc_feature (511)..(511): n is a, c, g, or t
  misc_feature (521)..(521): n is a, c, g, or t
atgggatctagattagataaaagtaaagtgattaacagcgcattagagctgcttaatgaggtcggaatcgaaggtttaacaacccgtaaactcgcccagaagctaggtgtagagcagcctacattgtattggcatgtaaaaaataagcgagctctgctcgacgccttagccattgagatgatggataggcacgcaactcactattgccctttagaaggggaaagctggcaagattttttacgtaatactgctaaaagtatgagatgtgctttactaagccatcgcgatggagcaaaagtatgtttaggtacacgctggacagaaaaactgtatgaaactgctgaaaatatgttagcctttttatgccaacaaggtttttcactagagaatgcattatatgcasysagtgctgtgagggtgtttactttaggttgcgtattgtttgatcaagagntccaagtcgctaaagaagaaagggaaacacctactactgctagtatgccgccattancccgacaagnttgggaattaaaggatcaccaaggtgcagagccagccttcttattcggccttgaattgatcatatgcggattagaaaaacaacttaaatgcgaaagtgggtcttaa

SEQ ID NO: 543 - DNA, 627 bp, Artificial Sequence
  synthetic construct; Sulfonylurea responsive repressor
atgggatctagattagataaaagtaaagtgattaacagcgcattagagctgcttaatgaggtcggaatcgaaggtttaacaacccgtaaactcgcccagaagctaggtgtagagcagcctacattgtattggcatgtaaaaaataagcgagctctgctcgacgccttagccattgagatgatggataggcacgcaactcacttgtgccctttagaaggggaaagctggcaagattttttacgtaatactgctaaaagtatgagatgtgctttactaagccatcgcgatggagcaaaagtatgtttaggtacacgctggacagaacaattgtatgaaactgctgaaaatatgttagcctttttatgccaacaaggtttttcactagagaatgcattatatgcagtgagtgctgtgagggtgtttactttaggttgcgtattgtttgatcaagasctccaagtcgctaaagaagaaagggaaacacctactwctgctagtatgycgccattagtgcgacaaggttgggaattaaaggatcaccaaggtgcagagccagccttcttattcggccttgaattgatcatatgcggattagaaaaacaacttaaatgcgaaagtgggtcttaa

SEQ ID NO: 544 - DNA, 627 bp, Artificial Sequence
  synthetic construct; Sulfonylurea responsive repressor
  misc_feature (454)..(454): n is a, c, g, or t
atgggatctagattagataaaagtaaagtgattaacagcgcattagagctgcttaatgaggtcggaatcgaaggtttaacaacccgtaaactcgcccagaagctaggtgtagagcagcctacattgtattggcatgtaaaaaataagcgagctctgctcgacgccttagccattgagatgatggataggcaccaaactcactattgccctttagaaggggaaagctggcaagattttttacgtaataatgctaaaagtatgagatgtgctttactaagccatcgcgatggagcaaaagtatggttaggtacacgctggacagaacaactgtatgaagctgctgaaaatctgttagcctttttatgccaacaaggtttttcactagagaatgcattatatgcagtgagtgctgtgaggawctttactttaggttgcgtattgtttgatcaagagntccaagtcgctaaagaagaaagggaaacacctactactgctagtatgccgccattattgcgacaagcttgggaattaaaggatcaccaaggtgcagagccagccttcttattcggccttgaattgatcatatgcggattagaaaaacaacttaaatgcgaaagtgggtcttaa

SEQ ID NO: 545 - DNA, 627 bp, Artificial Sequence
  synthetic construct; Sulfonylurea responsive repressor
atgggatctagattagataaaagtaaagtgattaacagcgcattagagctgcttaatgaggtcggaatcgaaggtttaacaacccgtaaactcgcccagaagctaggtgtagagcagcctacattgtattggcatgtaaaaaataagcgagctctgctcgacgccttagccattgagatgatggataggcaccaaactcactattgccctttagaaggggaaagctggcaagattttttacgtaataatgctaaaagtatgagatgtgctttactaagcaatcgcgatggagcaaaagtatgtttaggtacacgctggacagaaaaattgtatgaagctgctgaaaatcaattagcctttttatgccaacaaggtttttcactagagaatgcattatatgcagtgagtgctgtgagggtgtttactttaggttgcgtattgtttgatcaagagctccaagtcgctaaagaagaaagggaaacacctactactgctagtatkccgccattagtgcgacaagcttgggaattaaaggatcaccaaggtgcagagccagccttcttattcggccttgaattgatcatatgcggattagaaaaacaacttaaatgcgaaagtgggtcttaa

SEQ ID NO: 546 - DNA, 627 bp, Artificial Sequence
  synthetic construct; Sulfonylurea responsive repressor
atgggatctagattagataaaagtaaagtgattaacagcgcattagagctgcttaatgaggtcggaatcgaaggtttaacaacccgtaaactcgcccagaagctaggtgtagagcagcctacattgtattggcatgtaaaaaataagcgagctctgctcgacgccttagccattgagatgatggataggcacgcaactcactattgccctttagaaggggaaagctggcaagattttttacgtaatactgctaaaagtatgagatgtgctttactaagccatcgcgatggagcaaaagtatgtttaggtacacgctggacagaacaattgtatgaaactgctgaaaatcaattagcctttttatgccaacaaggtttttcactagagaatgcattatatgcagtgagtgctgtgagggtgtttactttaggttgcgtattgtttgatcaagagctccaagtcgctaaagaagaaagggaaacacctactactgctagtatgccgccattattgcgacaagcttgggaattaaaggatcaccaaggtgcagagccagccttcttattcggccttgaattgatcatatgcggattagaaaaacaacttaaatgcgaaagtgggtcttaa

SEQ ID NO: 547 - DNA, 627 bp, Artificial Sequence
  synthetic construct; Sulfonylurea responsive repressor
atgggatctagattagataaaagtaaagtgattaacagcgcattagagctgcttaatgaggtcggaatcgaaggtttaacaacccgtaaactcgcccagaagctaggtgtagagcagcctacattgtattggcatgtaaaaaataagcgagctctgctcgacgccttagccattgagatgatggataggcaccaaactcactattgccctttagaaggggaaagctggcaagattttttacgtaataatgctaaaagtatgagatgtgctttactaagccatcgcgatggagcaaaagtatgtttaggtacacgctggacagaaaaacattatgaaggtgctgaaaatcaattagcctttttatgccaacaaggtttttcactagagaatgcattatatgcaatgagtgctgtgagggtgtttactttaggttgcgtattgtttgatcaagagagccaagtcgctaaagaagaaagggaaacacctactactgctagtatgccgccattagtgcgacaagtttgggaattaaaggatcaccaaggtgcagagccagccttcttattcggccttgaattgatcatatgcggattagaaaaacaacttaaatgcgaaagtgggtcttaa

SEQ ID NO: 548 - DNA, 627 bp, Artificial Sequence
  synthetic construct; Sulfonylurea responsive repressor
atgggatctagattagataaaagtaaagtgattaacagcgcattagagctgcttaatgaggtcggaatcgaaggtttaacaacccgtaaactcgcccagaagctaggtgtagagcagcctacattgtattggcatgtaaaaaataagcgagctctgctcgacgccttagccattgagatgatggataggcaccaaactcacatgtgccctttagaaggggaaagctggcaagattttttacgtaataatgctaaaagtatgagatgtgctttactaagccatcgcgatggagcaaaagtatgtttaggtacacgctggacagaaaaacattatgaaactgctgaaaatcaattagcctttttatgccaacaaggtttttcactagagaatgcattatatgcagtgagtgctgtgagggtgtttactttaggttgcgtattgtttgatcaagagctccaagtcgctaaagaagaaagggaaacacctactactgctagtatgccgccattagtgcgacaagcttgggaattaaaggatcaccaaggtgcagagccagccttcttattcggccttgaattgatcatatgcggattagaaaaacaacttaaatgcgaaagtgggtcttaa

SEQ ID NO: 549 - DNA, 627 bp, Artificial Sequence
  synthetic construct; Sulfonylurea responsive repressor
atgggatctagattagataaaagtaaagtgattaacagcgcattagagctgcttaatgaggtcggaatcgaaggtttaacaacccgtaaactcgcccagaagctaggtgtagagcagcctacattgtattggcatgtaaaaaataagcgagctctgctcgacgccttagccattgagatgatggataggcacgcaactcacttgtgccctttagaaggggaaagctggcaagattttttacgtaataatgctaaaagtatgagatgtgctttactaagccatcgcgatggagcaaaagtatgtttaggtacacgctggacagaacaacaatatgaaactgctgaaaatatgttagcctttttatgccaacaaggtttttcactagagaatgcattatatgcagtgagtgctgtgaggaactttactttaggttgcgtattgtttgatcaagagagccaagtcgctaaagaagaaagggaaacacctactactgctagtatgccgccattattgcgacaagcttgggaattaaaggatcaccaaggtgcagagccagccttcttattgggccttgaattgatcatatgcggattagaaaaacaacttaaatgcgaaagtgggtcttaa

SEQ ID NO: 550 - DNA, 627 bp, Artificial Sequence
  synthetic construct; Sulfonylurea responsive repressor
atgggatctagattagataaaagtaaagtgattaacagcgcattagagctgcttaatgaggtcggaatcgaaggtttaacaacccgtaaactcgcccagaagctaggtgtagagcagcctacattgtattggcatgtaaaaaataagcgagctctgctcgacgccttagccattgagatgatggataggcacccaactcactattgccctttagaaggggaaagctggcaagattttttacgtaataatgctaaaagtatgagatgtgctttactaagccatcgcgatggagcaaaagtatgtttaggtacacgctggacagaacaacaatatgaaactgctgaaaatcaattagcctttttatgccaacaaggtttttcactagagaatgcattatatgcaatgagtgctgtgaggaactttactttaggttgcgtattgtttgatcaagagakccaagtcgctaaagaagaaagggaaacacctactactgctagtatgccgccattattgcgacaagcttgggaattaaaggatcaccaaggtgcagagccagccttcttattcggccttgaattgatcatatgcggattagaaaaacaacttaaatgcgaaagtgggtcttaa

SEQ ID NO: 551 - DNA, 627 bp, Artificial Sequence
  synthetic construct; Sulfonylurea responsive repressor
atgggatctagattagataaaagtaaagtgattaacagcgcattagagctgcttaatgaggtcggaatcgaaggtttaacaacccgtaaactcgcccagaagctaggtgtagagcagcctacattgtattggcatgtaaaaaataagcgagctctgctcgacgccttagccattgagatgatggataggcaccaaactcacttttgccctttagaaggggaaagctggcaagattttttacgtaatactgctaaaagtatgagatgtgctttactaagccatcgcgatggagcaaaagtatgtttaggtacacgctggacagaacaacaatatgaaactgctgaaaatatgttagcctttttatgccaacaaggtttttcactagagaatgcattatatgcagtgagtgctgtgagggtgtttactttaggttgcgtattgtttgatcaagagagccaagtcgctaaagaagaaagggaaacacctactactgctagtatgccgccattagcccgacaagcttgggaattaaaggatcaccaaggtgcagagccagccttcttattcggccttgaattgatcatatgcggattagaaaaacaacttaaatgcgaaagtgggtcttaa

SEQ ID NO: 552 - DNA, 627 bp, Artificial Sequence
  synthetic construct; Sulfonylurea responsive repressor
atgggatctagattagataaaagtaaagtgattaacagcgcattagagctgcttaatgaggtcggaatcgaaggtttaacaacccgtaaactcgcccagaagctaggtgtagagcagcctacattgtattggcatgtaaaaaataagcgagctctgctcgacgccttagccattgagatgatggataggcaccaaactcacgtgtgccctttagaaggggaaagctggcaagattttttacgtaataatgctaaaagtatgagatgtgctttactaagccatcgcgatggagcaaaagtatgtttaggtacacgctggacagaacaaatgtatgaaactgctgaaaatcaattagcctttttatgccaacaaggtttttcactagagaatgcattatatgcagtgagtgctgtgagggtgtttactttaggttgcgtattgtttgatcaagagagccaagtcgctaaagaagaaagggaaacacctactactgctagtatgccgccattattgcgacaagcttgggaattaaaggatcaccaaggtgcagagccagccttcttattcggccttgaattgatcatatgcggattagaaaaacaacttaaatgcgaaagtgggtcttaa

SEQ ID NO: 553 - DNA, 627 bp, Artificial Sequence
  synthetic construct; Sulfonylurea responsive repressor
atgggatctagattagataaaagtaaagtgattaacagcgcattagagctgcttaatgaggtcggaatcgaaggtttaacaacccgtaaactcgcccagaagctaggtgtagagcagcctacattgtattggcatgtaaaaaataagcgagctctgctcgacgccttagccattgagatgatggataggcacgcaactcactattgccctttagaaggggaaagctggcaagattttttacgtaatactgctaaaagtatgagatgtgctttactaagccatcgcgatggagcaaaagtatgtttaggtacacgctggacagaacaattgtatgaaactgctgaaaatcaattagcctttttatgccaacaaggtttttcactagagaatgcattatatgcaatgagtgctgtgagggtgtttactttaggttgcgtattgtttgatcaagagagccaagtcgctaaagaagaaagggaaacacctactactgctagtatgccgccattattgcgacaagcttgggaattaaaggatcaccaaggtgcagagccagccttcttattcggccttgaattgatcatatgcggattagaaaaacaacttaaatgcgaaagtgggtcttaa

SEQ ID NO: 554 - DNA, 627 bp, Artificial Sequence
  synthetic construct; Sulfonylurea responsive repressor
atgggatctagattagataaaagtaaagtgattaacagcgcattagagctgcttaatgaggtcggaatcgaaggtttaacaacccgtaaactcgcccagaagctaggtgtagagcagcctacattgtattggcatgtaaaaaataagcgagctctgctcgacgccttagccattgagatgatggataggcacgcaactcactattgccctttagaaggggaaagctggcaagattttttacgtaataatgctaaaagtatgagatgtgctttactaagccatcgcgatggagcaaaagtatgtttaggtacacgctggacagaacaattgtatgaaactgctgaaaatatgttagcctttttatgccaacaaggtttttcactagagaatgcattatatgcaatgagtgctgtgagggtgtttactttaggttgcgtattgtttgatcaagagagccaagtcgctaaagaagaaagggaaacacctactactgctagtatgccgccattagtgcgacaaggttgggaattaaaggatcaccaaggtgcagagccagccttcttattcggccttgaattgatcatatgcggattagaaaaacaacttaaatgcgaaagtgggtcttaa

SEQ ID NO: 555 - DNA, 627 bp, Artificial Sequence
  synthetic construct; Sulfonylurea responsive repressor
atgggatctagattagataaaagtaaagtgattaacagcgcattagagctgcttaatgaggtcggaatcgaaggtttaacaacccgtaaactcgcccagaagctaggtgtagagcagcctacattgtattggcatgtaaaaaataagcgagctctgctcgacgccttagccattgagatgatggataggcaccaaactcactattgccctttagaaggggaaagctggcaagattttttacgtaataatgctaaaagtatgagatgtgctttactaagccatcgcgatggagcaaaagtatggttaggtacacgctggacagaaaaacaatatgaaagtgctgaaaatatgttagcctttttatgccaacaaggtttttcactagagaatgcattatatgcagtgagtgctgtgagggtgtttactttaggttgcgtattgtttgatcaagagctccaagtcgctaaagaagaaagggaaacacctactactgctagtatgccgccattagtgcgacaagcttgggaattaaaggatcaccaaggtgcagagccagccttcttattcggccttgaattgatcatatgcggattagaaaaacaacttaaatgcgaaagtgggtcttaa

SEQ ID NO: 556 - DNA, 627 bp, Artificial Sequence
  synthetic construct; Sulfonylurea responsive repressor
atgggatctagattagataaaagtaaagtgattaacagcgcattagagctgcttaatgaggtcggaatcgaaggtttaacaacccgtaaactcgcccagaagctaggtgtagagcagcctacattgtattggcatgtaaaaaataagcgagctctgctcgacgccttagccattgagatgatggataggcaccaaactcacatgtgccctttagaaggggaaagctggcaagattttttacgtaatactgctaaaagtatgagatgtgctttactaagccatcgcgatggagcaaaagtatgtttaggtacacgctggacagaacaaatgtatgaagctgctgaaaatcaattagcctttttatgccaacaaggtttttcactagagaatgcattatatgcaatgagtgctgtgagggtgtttactttaggttgcgtattgtttgatcaagagagccaagtcgctaaagaagaaagggaaacacctactactgctagtatgccgccattagtgcgacaagtttgggaattaaaggatcaccaaggtgcagagccagccttcttattcggccttgaattgatcatatgcggattagaaaaacaacttaaatgcgaaagtgggtcttaa

SEQ ID NO: 557 - DNA, 627 bp, Artificial Sequence
  synthetic construct; Sulfonylurea responsive repressor
atgggatctagattagataaaagtaaagtgattaacagcgcattagagctgcttaatgaggtcggaatcgaaggtttaacaacccgtaaactcgcccagaagctaggtgtagagcagcctacattgtattggcatgtaaaaaataagcgagctctgctcgacgccttagccattgagatgatggataggcaccaaactcactattgccctttagaaggggaaagctggcaagattttttacgtaatactgctaaaagtatgagatgtgctttactaagccatcgcgatggagcaaaagtatgtttaggtacacgctggacagaacaaatgtatgaaactgctgaaaatcaattagcctttttatgccaacaaggtttttcactagagaatgcattatatgcaatgagtgctgtgagggtgtttactttaggttgcgtattgtttgatcaagagagccaagtcgctaaagaagaaagggaaacacctactactgctagtatgccgccattattgcgacaagtttgggaattaaaggatcaccaaggtgcagagccagccttcttattcggccttgaattgatcatatgcggattagaaaaacaacttaaatgcgaaagtgggtcttaa

SEQ ID NO: 558 - DNA, 627 bp, Artificial Sequence
  synthetic construct; Sulfonylurea responsive repressor
  misc_feature (325)..(325): n is a, c, g, or t
  misc_feature (338)..(338): n is a, c, g, or t
  misc_feature (513)..(513): n is a, c, g, or t
atgggatctagattagataaaagtaaagtgattaacagcgcattagagctgcttaatgaggtcggaatcgaaggtttaacaacccgtaaactcgcccagaagctaggtgtagagcagcctacattgtattggcatgtaaaaaataagcgagctctgctcgacgccttagccattgagatgatggataggcaccaaactcacatttgccctttagaaggggaaagctggcaagattttttacgtaatactgctaaaagtatgagatgtgctttactaagccatcgcgatggagcaaaagtatgtttaggtacacgctggacagaanaacartatgaaantgctgaaaatatgttagcctttttatgccaacaaggtttttcactagagaatgcattatatgcaatgagtgctgtgagggtgtttactttaggttgcgtattgtttgatcaagagctccaagtcgctaaagaagaaagggaaacacctactactgctagtatgccgccattagtncgacaagtttgggaattaaaggatcaccaaggtgcagagccagccttcttattcggccttgaattgatcatatgcggattagaaaaacaacttaaatgcgaaagtgggtcttaa

SEQ ID NO: 559 - DNA, 627 bp, Artificial Sequence
  synthetic construct; Sulfonylurea responsive repressor
atgggatctagattagataaaagtaaagtgattaacagcgcattagagctgcttaatgaggtcggaatcgaaggtttaacaacccgtaaactcgcccagaagctaggtgtagagcagcctacattgtattggcatgtaaaaaataagcgagctctgctcgacgccttagccattgagatgatggataggcaccaaactcacatgtgccctttagaaggggaaagctggcaagattttttacgtaataatgctaaaagtatgagatgtgctttactaagccatcgcgatggagcaaaagtatgtttaggtacacgctggacagaacaacattatgaagctgctgaaaatcaattagcctttttatgccaacaaggtttttcactagagaatgcattatatgcaatgagtgctgtgagggtgtttactttaggttgcgtattgtttgatcaagagagccaagtcgctaaagaagaaagggaaacacctactactgctagtatgccgccattagtgcgacaagcttgggaattaaaggatcaccaaggtgcagagccagccttcttattcggccttgaattgatcatatgcggattagaaaaacaacttaaatgcgaaagtgggtcttaa

SEQ ID NO: 560 - DNA, 627 bp, Artificial Sequence
  synthetic construct; Sulfonylurea responsive repressor
  misc_feature (403)..(403): n is a, c, g, or t
  misc_feature (420)..(420): n is a, c, g, or t
  misc_feature (513)..(513): n is a, c, g, or t
atgggatctagattagataaaagtaaagtgattaacagcgcattagagctgcttaatgaggtcggaatcgaaggtttaacaacccgtaaactcgcccagaagctaggtgtagagcagcctacattgtattggcatgtaaaaaataagcgagctctgctcgacgccttagccattgagatgatggataggcacgcaactcactattgccctttagaaggggaaagctggcaagattttttacgtaatactgctaaaagtatgagatgtgctttactaagccatcgcgatggagcaaaagtatgtttaggtacacgctggacagaacaacattatgaaactgctgaaaatcaattagcctttttatgccaacaaggtttttcactagagaatgcattatatgcantgagtgctgtgagggtntttactttaggttgcgtattgtttgatcaagagctccaagtcgctaaagaagaaagggaaacacctactactgctagtatgccgccattattncgacaagtttgggaattaaaggatcaccaaggtgcagagccagccttcttattcggccttgaattgatcatatgcggattagaaaaacaacttaaatgcgaaagtgggtcttaa

SEQ ID NO: 561 - DNA, 627 bp, Artificial Sequence
  synthetic construct; Sulfonylurea responsive repressor
  misc_feature (203)..(203): n is a, c, g, or t
  misc_feature (338)..(338): n is a, c, g, or t
  misc_feature (415)..(415): n is a, c, g, or t
atgggatctagattagataaaagtaaagtgattaacagcgcattagagctgcttaatgaggtcggaatcgaaggtttaacaacccgtaaactcgcccagaagctaggtgtagagcagcctacattgtattggcatgtaaaaaataagcgagctctgctcgacgccttagccattgagatgatggataggcaccaaactcactnttgccctttagaaggggaaagctggcaagattttttacgtaatactgctaaaagtatgagatgtgctttactaagccatcgcgatggagcaaaagtatgtttaggtacacgctggacagaacaactgtatgaagntgctgaaaatcaattagcctttttatgccaacaaggtttttcactagagaatgcattatatgcaatgagtgctgtgngggtgtttactttaggttgcgtattgtttgatcaagagctccaagtcgctaaagaagaaagggaaacacctactactgctagtatgccgccattatcccgacaagtttgggaattaaaggatcaccaaggtgcagagccagccttcttattcggccttgaattgatcatatgcggattagaaaaacaacttaaatgcgaaagtgggtcttaa

SEQ ID NO: 562 - DNA, 627 bp, Artificial Sequence
  synthetic construct; Sulfonylurea responsive repressor
atgggatctagattagataaaagtaaagtgattaacagcgcattagagctgcttaatgaggtcggaatcgaaggtttaacaacccgtaaactcgcccagaagctaggtgtagagcagcctacattgtattggcatgtaaaaaataagcgagctctgctcgacgccttagccattgagatgatggataggcacgcaactcacatttgccctttagaaggggaaagctggcaagattttttacgtaataatgctaaaagtatgagatgtgctttactaagccatcgcgatggagcaaaagtatgtttaggtacacgctggacagaacaacaatatgaagctgctgaaaatatgttagcctttttatgccaacaaggtttttcactagagaatgcattatatgcaatgagtgctgtgagggtgtttactttaggttgcgtattgtttgatcaagagctccaagtcgctaaagaagaaagggaaacacctactactgctagtatgccgccattattgcgacaagtttgggaattaaaggatcaccaaggtgcagagccagccttcttattcggccttgaattgatcatatgcggattagaaaaacaacttaaatgcgaaagtgggtcttaa

SEQ ID NO: 563 - DNA, 627 bp, Artificial Sequence
  synthetic construct; Sulfonylurea responsive repressor
atgggatctagattagataaaagtaaagtgattaacagcgcattagagctgcttaatgaggtcggaatcgaaggtttaacaacccgtaaactcgcccagaagctaggtgtagagcagcctacattgtattggcatgtaaaaaataagcgagctctgctcgacgccttagccattgagatgatggataggcaccaaactcacatttgccctttagaaggggaaagctggcaagattttttacgtaataatgctaaaagtatgagatgtgctttactaagccatcgcgatggagcaaaagtatgtttaggtacacgctggacagaacaacaatatgaaactgctgaaaatcaattagcctttttatgccaacaaggtttttcactagagaatgcattatatgcaatgagtgctgtgagggtgtttactttaggttgcgtattgtttgatcaagagagccaagtcgctaaagaagaaagggaaacacctactactgctagtatgccgccattagtgcgacaaggttgggaattaaaggatcaccaaggtgcagagccagccttcttattcggccttgaattgatcatatgcggattagaaaaacaacttaaatgcgaaagtgggtcttaa

SEQ ID NO: 564 - DNA, 627 bp, Artificial Sequence
  synthetic construct; Sulfonylurea responsive repressor
atgggatctagattagataaaagtaaagtgattaacagcgcattagagctgcttaatgaggtcggaatcgaaggtttaacaacccgtaaactcgcccagaagctaggtgtagagcagcctacattgtattggcatgtaaaaaataagcgagctctgctcgacgccttagccattgagatgatggataggcaccaaactcacgtgtgccctttagaaggggaaagctggcaagattttttacgtaataatgctaaaagtatgagatgtgctttactaagccatcgcgatggagcaaaagtatgtttaggtacacgctggacagaacaacaatatgaaagtgctgaaaatatgttagcctttttatgccaacaaggtttttcactagagaatgcattatatgcaatgagtgctgtgagggtgtttactttaggttgcgtattgtttgatcaagagagccaagtcgctaaagaagaaagggaaacacctactactgctagtatgccgccattattgcgacaagttttggaattaaaggatcaccaaggtgcagagccagccttcttattcggccttgaattgatcatatgcggattagaaaaacaacttaaatgcgaaagtgggtcttaa

SEQ ID NO: 565 - DNA, 627 bp, Artificial Sequence
  synthetic construct; Sulfonylurea responsive repressor
atgggatctagattagataaaagtaaagtgattaacagcgcattagagctgcttaatgaggtcggaatcgaaggtttaacaacccgtaaactcgcccagaagctaggtgtagagcagcctacattgtattggcatgtaaaaaataagcgagctctgctcgacgccttagccattgagatgatggataggcacgcaactaactattgccctttagaaggggaaagctggcaagattttttacgtaatactgctaaaagtatgagatgtgctttactaagccatcgcgatggagcaaaagtatgtttaggtacwcgctggacagaacaacaatatgaaactgctgaaaatatgttagcctttttatgccaacaaggtttttcactagagaatgcattatatgcagtgagtgctgtgagggtgtttactttaggttgcgtattgtttgatcaagagctccaagtcgctaaagaagaaagggaaacacctactactgctagtatgccgccattattgcgacaagtttgggaattaaaggatcaccaaggtgcagagccagccttcttattcggccttgaattgatcatatgcggattagaaaaacaacttaaatgcgaaagtgggtcttaa

SEQ ID NO: 566 - DNA, 627 bp, Artificial Sequence
  synthetic construct; Sulfonylurea responsive repressor
atgggatctagattagataaaagtaaagtgattaacagcgcattagagctgcttaatgaggtcggaatcgaaggtttaacaacccgtaaactcgcccagaagctaggtgtagagcagcctacattgtattggcatgtaaaaaataagcgagctctgctcgacgccttagccattgagatgatggataggcaccaaactcacttttgccctttagaaggggaaagctggcaagattttttacgtaatactgctaaaagtatgagatgtgctttactaagccatcgcgatggagcaaaagtatggttaggtacacgctggacagaaaaacaatatgaaactgctgaaaatcaattagcctttttatgccaacaaggtttttcactagagaatgcattatatgcagtgagtgctgtgagggtgtttactttaggttgcgtattgtttgatcaagagctccaagtcgctaaagaagaaagggaaacacctactactgctagtatgccgccattattgcgacaagcttgggaattaaaggatcaccaaggtgcagagccagccttcttattcggccttgaattgatcatatgcggattagaaaaacaacttaaatgcgaaagtgggtcttaa

SEQ ID NO: 567 - DNA, 627 bp, Artificial Sequence
  synthetic construct; Sulfonylurea responsive repressor
  misc_feature (325)..(325): n is a, c, g, or t
  misc_feature (328)..(330): n is a, c, g, or t
  misc_feature (337)..(337): n is a, c, g, or t
  misc_feature (415)..(415): n is a, c, g, or t
  misc_feature (418)..(420): n is a, c, g, or t
  misc_feature (513)..(513): n is a, c, g, or t
  misc_feature (521)..(521): n is a, c, g, or t
atgggatctagattagataaaagtaaagtgattaacagcgcattagagctgcttaatgaggtcggaatcgaaggtttaacaacccgtaaactcgcccagaagctaggtgtagagcagcctacattgtattggcatgtaaaaaataagcgagctctgctcgacgccttagccattgagatgatggataggcaccaaactcactattgccctttagaaggggaaagctggcaagattttttacgtaatactgctaaaagtatgagatgtgctttactaagccatcgcgatggagcaaaagtatgtttaggtacacgctggacagaanaannntatgaanctgctgaaaatcaattagcctttttatgccaacaaggtttttcactagagaatgcattatatgcaatgagtgctgtgnggnnntttactttaggttgcgtattgtttgatcaagagagccaagtcgctaaagaagaaagggaaacacctactactgctagtatgccgccattattncgacaagnttgggaattaaaggatcaccaaggtgcagagccagccttcttattcggccttgaattgatcatatgcggattagaaaaacaacttaaatgcgaaagtgggtcttaa

SEQ ID NO: 568 - DNA, 627 bp, Artificial Sequence
  synthetic construct; Sulfonylurea responsive repressor
atgggatctagattagataaaagtaaagtgattaacagcgcattagagctgcttaatgaggtcggaatcgaaggtttaacaacccgtaaactcgcccagaagctaggtgtagagcagcctacattgtattggcatgtaaaaaataagcgagctctgctcgacgccttagccattgagatgatggataggcaccaaactcactattgccctttagaaggggaaagctggcaagattttttacgtaataatgctaaaagtatgagatgtgctttactaagccatcgcgatggagcaaaagtatgtttaggtacacgctggacagaacaattgtatgaaactgctgaaaatatgttagcctttttatgccaacaaggtttttcactagagaatgcattatatgcaatgagtgctgtgagggtgtttactttaggttgcgtattgtttgatcaagagagccaagtcgctaaagaagaaagggaaacacctactactgctagtatgccgccattattgcgacaagtttgggaattaaaggatcaccaaggtgcagagccagccttcttattcggccttgaattgatcatatgcggattagaaaaacaacttaaatgcgaaagtgggtcttaa

SEQ ID NO: 569 - DNA, 627 bp, Artificial Sequence
  synthetic construct; Sulfonylurea responsive repressor
atgggatctagattagataaaagtaaagtgattaacagcgcattagagctgcttaatgaggtcggaatcgaaggtttaacaacccgtaaactcgcccagaagctaggtgtagagcagcctacattgtattggcatgtaaaaaataagcgagctctgctcgacgccttagccattgagatgatggataggcacgcaactcacttgtgccctttagaaggggaaagctggcaagattttttacgtaatactgctaaaagtatgagatgtgctttactaagccatcgcgatggagcaaaagtatgtttaggtacacgctggacagaacaacaatatgaagctgctgaaaatatgttagcctttttatgccaacaaggtttttcactagagaatgcattatatgcaatgagtgctgtgagggtgtttactttaggttgcgtattgtttgatcaagagagccaagtcgctaaagaagaaagggaaacacctactactgctagtatgccgccattattgcgacaagtttgggaattaaaggatcaccaaggtgcagagccagccttcttattcggccttgaattgatcatatgcggattagaaaaacaacttaaatgcgaaagtgggtcttaa

SEQ ID NO: 570 - DNA, 627 bp, Artificial Sequence
  synthetic construct; Sulfonylurea responsive repressor
atgggatctagattagataaaagtaaagtgattaacagcgcattagagctgcttaatgaggtcggaatcgaaggtttaacaacccgtaaactcgcccagaagctaggtgtagagcagcctacattgtattggcatgtaaaaaataagcgagctctgctcgacgccttagccattgagatgatggataggcaccaaactcactattgccctttagaaggggaaagctggcaagattttttacgtaataatgctaaaagtatgagatgtgctttactaagccatcgcgatggagcaaaagtatgtttaggtacacgctggacagaaaaacattatgaaagtgctgaaaatatgttagcctttttatgccaacaaggtttttcactagagaatgcattatatgcaatgagtgctgtgagggtgtttactttaggttgcgtattgtttgatcaagagctccaagtcgctaaagaagaaagggaaacacctactactgctagtatgccgccattattgcgacaagtttgggaattaaaggatcaccaaggtgcagagccagccttcttattcggccttgaattgatcatatgcggattagaaaaacaacttaaatgcgaaagtgggtcttaa

SEQ ID NO: 571 - DNA, 627 bp, Artificial Sequence
  synthetic construct; Sulfonylurea responsive repressor
atgggatctagattagataaaagtaaagtgattaacagcgcattagagctgcttaatgaggtcggaatcgaaggtttaacaacccgtaaactcgcccagaagctaggtgtagagcagcctacattgtattggcatgtaaaaaataagcgagctctgctcgacgccttagccattgagatgatggataggcaccaaactcactattgccctttagaaggggaaagctggcaagattttttacgtaataatgctaaaagtatgagatgtgctttactaagccatcgcgatggagcaaaagtatgtttaggtacacgctggacagaacaacattatgaaactgctgaaaatcaattagcctttttatgccaacaaggtttttcactagagaatgcattatatgcaatgagtgctgtgagggtgtttactttaggttgcgtattgtttgatcaagagagccaagtcgctaaagaagaaagggaaacacctactactgctagtatgccgccattagtgcgacaaggttgggaattaaaggatcaccaaggtgcagagccagccttcttattcggccttgaattgatcatatgcggattagaaaaacaacttaaatgcgaaagtgggtcttaa

SEQ ID NO: 572 - DNA, 627 bp, Artificial Sequence
  synthetic construct; Sulfonylurea responsive repressor
atgggatctagattagataaaagtaaagtgattaacagcgcattagagctgcttaatgaggtcggaatcgaaggtttaacaacccgtaaactcgcccagaagctaggtgtagagcagcctacattgtattggcatgtaaaaaataagcgagctctgctcgacgccttagccattgagatgatggataggcacgcaactcactattgccctttagaaggggaaagctggcaagattttttacgtaataatgctaaaagtatgagatgtgctttactaagccatcgcgatggagcaaaagtatgtttaggtacacgctggacagaaaaacaatatgaagctgctgaaaatcaattagcctttttatgccaacaaggtttttcactagagaatgcattatatgcagtgagtgctgtgagggtgtttactttaggttgcgtattgtttgatcaagagagccaagtcgctaaagaagaaagggaaacacctactactgctagtatgccgccattattgcgacaaggttgggaattaaaggatcaccaaggtgcagagccagccttcttattcggccttgaattgatcatatgcggattagaaaaacaacttaaatgcgaaagtgggtcttaa

SEQ ID NO: 573 - DNA, 627 bp, Artificial Sequence
  synthetic construct; Sulfonylurea responsive repressor
atgggatctagattagataaaagtaaagtgattaacagcgcattagagctgcttaatgaggtcggaatcgaaggtttaacaacccgtaaactcgcccagaagctaggtgtagagcagcctacattgtattggcatgtaaaaaataagcgagctctgctcgacgccttagccattgagatgatggataggcacgcaactcactattgccctttagaaggggaaagctggcaagattttttacgtaataatgctaaaagtatgagatgtgctttactaagccatcgcgatggagcaaaagtatgtttaggtacacgctggacagaacaattgtatgaagctgctgaaaatcaattagcctttttatgccaacaaggtttttcactagagaatgcattatatgcaatgagtgctgtgagggtgtttactttaggttgcgtattgtttgatcaagagagccaagtcgctaaagaagaaagggaaacacctactactgctagtatgccgccattagtgcgacaagtttgggaattaaaggatcaccaaggtgcagagccagccttcttattcggccttgaattgatcatatgcggattagaaaaacaacttaaatgcgaaagtgggtcttaa

SEQ ID NO: 574 - DNA, 627 bp, Artificial Sequence; identical to SEQ ID NO: 434
  synthetic construct; Sulfonylurea responsive repressor

SEQ ID NO: 575 - DNA, 627 bp, Artificial Sequence
  synthetic construct; Sulfonylurea responsive repressor
atgggatctagattagataaaagtaaagtgattaacagcgcattagagctgcttaatgaggtcggaatcgaaggtttaacaacccgtaaactcgcccagaagctaggtgtagagcagcctacattgtattggcatgtaaaaaataagcgagctctgctcgacgccttagccattgagatgatggataggcaccaaactcactattgccctttagaaggggaaagctggcaagattttttacgtaataatgctaaaagtatgagatgtgctttactaagccatcgcgatggagcaaaagtatgtttaggtacacgctggacagaaaaacattatgaaactgctgaaaatatgttagcctttttatgccaacaaggtttttcactagagaatgcattatatgcagtgagtgctgtgagggtgtttactttaggttgcgtattgtttgatcaagagctccaagtcgctaaagaagaaagggaaacacctactactgctagtatgccgccattattgcgacaagtttgggaattaaaggatcaccaaggtgcagagccagccttcttattcggccttgaattgatcatatgcggattagaaaaacaacttaaatgcgaaagtgggtcttaa

SEQ ID NO: 576 - DNA, 627 bp, Artificial Sequence
  synthetic construct; Sulfonylurea responsive repressor
  misc_feature (193)..(193): n is a, c, g, or t
  misc_feature (330)..(330): n is a, c, g, or t
  misc_feature (337)..(338): n is a, c, g, or t
  misc_feature (403)..(403): n is a, c, g, or t
  misc_feature (512)..(512): n is a, c, g, or t
atgggatctagattagataaaagtaaagtgattaacagcgcattagagctgcttaatgaggtcggaatcgaaggtttaacaacccgtaaactcgcccagaagctaggtgtagagcagcctacattgtattggcatgtaaaaaataagcgagctctgctcgacgccttagccattgagatgatggataggcacncaactcactattgccctttagaaggggaaagctggcaagattttttacgtaatactgctaaaagtatgagatgtgctttactaagccatcgcgatggagcaaaagtatggttaggtacacgctggacagaacaacantatgaanntgctgaaaatctgttagcctttttatgccaacaaggtttttcactagagaatgcattatatgcantgagtgctgtgaggaactttactttaggttgcgtattgtttgatcaagagagccaagtcgctaaagaagaaagggaaacacctactactgctagtatgccgccattatnccgacaaggttgggaattaaaggatcaccaaggtgcagagccagccttcttattcggccttgaattgatcatatgcggattagaaaaacaacttaaatgcgaaagtgggtcttaa

SEQ ID NO: 577 - DNA, 627 bp, Artificial Sequence
  synthetic construct; Sulfonylurea responsive repressor
atgggatctagattagataaaagtaaagtgattaacagcgcattagagctgcttaatgaggtcggaatcgaaggtttaacaacccgtaaactcgcccagaagctaggtgtagagcagcctacattgtattggcatgtaaaaaataagcgagctctgctcgacgccttagccattgagatgatggataggcaccaaactcacatttgccctttagaaggggaaagctggcaagattttttacgtaatactgctaaaagtatgagatgtgctttactaagccatcgcgatggagcaaaagtatgtttaggtacacgctggacagaaaaacattatgaagctgctgaaaatatgttagcctttttatgccaacaaggtttttcactagagaatgcattatatgcagtgagtgctgtgagggtgtttactttaggttgcgtattgtttgatcaagagagccaagtcgctaaagaagaaagggaaacacctactactgctagtatgccgccattagtgcgacaagtttgggaattaaaggatcaccaaggtgcagagccagccttcttattcggccttgaattgatcatatgcggattagaaaaacaacttaaatgcgaaagtgggtcttaa

SEQ ID NO: 578 - DNA, 627 bp, Artificial Sequence
  synthetic construct; Sulfonylurea responsive repressor
atgggatctagattagataaaagtaaagtgattaacagcgcattagagctgcttaatgaggtcggaatcgaaggtttaacaacccgtaaactcgcccagaagctaggtgtagagcagcctacattgtattggcatgtaaaaaataagcgagctctgctcgacgccttagccattgagatgatggataggcaccaaactcactattgccctttagaaggggaaagctggcaagattttttacgtaataatgctaaaagtatgagatgtgctttactaagccatcgcgatggagcaaaagtatgtttaggtacacgctggacagaacaattgtatgaaagtgctgaaaatcaattagcctttttatgccaacaaggtttttcactagagaatgcattatatgcaatgagtgctgtgagggtgtttactttaggttgcgtattgtttgatcaagagctccaagtcgctaaagaagaaagggaaacacctactactgctagtatgccgccattattgcgacaaggttgggaattaaaggatcaccaaggtgcagagccagccttcttattcggccttgaattgatcatatgcggattagaaaaacaacttaaatgcgaaagtgggtcttaa

SEQ ID NO: 579 - DNA, 627 bp, Artificial Sequence
  synthetic construct; Sulfonylurea responsive repressor
atgggatctagattagataaaagtaaagtgattaacagcgcattagagctgcttaatgaggtcggaatcgaaggtttaacaacccgtaaactcgcccagaagctaggtgtagagcagcctacattgtattggcatgtaaaaaataagcgagctctgctcgacgccttagccattgagatgatggataggcacgcaactcacatttgccctttagaaggggaaagctggcaagattttttacgtaataatgctaaaagtatgagatgtgctttactaagccatcgcgatggagcaaaagtatgtttaggtacacgctggacagaacaacaatatgaagctgctgaaaatcaattagcctttttatgccaacaaggtttttcactagagaatgcattatatgcagtgagtgctgtgagggtgtttactttaggttgcgtattgtttgatcaagagctccaagtcgctaaagaagaaagggaaacacctactactgctagtatgccgccattattgcgacaagcttgggaattaaaggatcaccaaggtgcagagccagccttcttattcggccttgaattgatcatatgcggattagaaaaacaacttaaatgcgaaagtgggtcttaa

SEQ ID NO: 580 - DNA, 627 bp, Artificial Sequence
  synthetic construct; Sulfonylurea responsive repressor
atgggatctagattagataaaagtaaagtgattaacagcgcattagagctgcttaatgaggtcggaatcgaaggtttaacaacccgtaaactcgcccagaagctaggtgtagagcagcctacattgtattggcatgtaaaaaataagcgagctctgctcgacgccttagccattgagatgatggataggcacgcaactcactattgccctttagaaggggaaagctggcaagattttttacgtaataatgctaaaagtatgagatgtgctttactaagccatcgcgatggagcaaaagtatgtttaggtacacgctggacagaaaaacaatatgaaactgctgaaaatcaattagcctttttatgccaacaaggtttttcactagagaatgcattatatgcagtgagtgctgtgagggtgtttactttaggttgcgtattgtttgatcaagagctccaagtcgctaaagaagaaagggaaacacctactactgctagtatgccgccattattgcgacaagtttgggaattaaaggatcaccaaggtgcagagccagccttcttattcggccttgaattgatcatatgcggattagaaaaacaacttaaatgcgaaagtgggtcttaa

SEQ ID NO: 581 - DNA, 627 bp, Artificial Sequence
  synthetic construct; Sulfonylurea responsive repressor
atgggatctagattagataaaagtaaagtgattaacagcgcattagagctgcttaatgaggtcggaatcgaaggtttaacaacccgtaaactcgcccagaagctaggtgtagagcagcctacattgtattggcatgtaaaaaataagcgagctctgctcgacgccttagccattgagatgatggataggcacgcaactcactattgccctttagaaggggaaagctggcaagattttttacgtaataatgctaaaagtatgagatgtgctttactaagccatcgcgatggagcaaaagtatgtttaggtacacgctggacagaaaaacattatgaaactgctgaaaatcaattagcctttttatgccaacaaggtttttcactagagaatgcattatatgcaatgagtgctgtgagggtgtttactttaggttgcgtattgtttgatcaagagagccaagtcgctaaagaagaaagggaaacacctactactgctagtatgccgccattattgcgacaagtttgggaattaaaggatcaccaaggtgcagagccagccttcttattcggccttgaattgatcatatgcggattagaaaaacaacttaaatgcgaaagtgggtcttaa

SEQ ID NO: 582 - DNA, 627 bp, Artificial Sequence
  synthetic construct; Sulfonylurea responsive repressor
  misc_feature (328)..(328): n is a, c, g, or t
atgggatctagattagataaaagtaaagtgattaacagcgcattagagctgcttaatgaggtcggaatcgaaggtttaacaacccgtaaactcgcccagaagctaggtgtagagcagcctacattgtattggcatgtaaaaaataagcgagctctgctcgacgccttagccattgagatgatggataggcaccaaactcactattgccctttagaaggggaaagctggcaagattttttacgtaataatgctaaaagtatgagatgtgctttactaagccatcgcgatggagcaaaagtatggttaggtacacgctggacagaacaantgtatgaagctgctgaaaatatgttagcctttttatgccaacaaggtttttcactagagaatgcattatatgcagtgagtgctgtgggggtgtttactttaggttgcgtattgtttgatcaagagctccaagtcgctaaagaagaaagggaaacacctactactgctagtatgccgccattagcccgacaagttttggaattaaaggatcaccaaggtgcagagccagccttcttattcggccttgaattgatcatatgcggattagaaaaacaacttaaatgcgaaagtgggtcttaa

SEQ ID NO: 583 - DNA, 627 bp, Artificial Sequence
  synthetic construct; Sulfonylurea responsive repressor
atgggatctagattagataaaagtaaagtgattaacagcgcattagagctgcttaatgaggtcggaatcgaaggtttaacaacccgtaaactcgcccagaagctaggtgtagagcagcctacattgtattggcatgtaaaaaataagcgagctctgctcgacgccttagccattgagatgatggataggcacgcaactcactattgccctttagaaggggaaagctggcaagattttttacgtaataatgctaaaagtatgagatgtgctttactaagccatcgcgatggagcaaaagtatgtttaggtacacgctggacagaaaaattgtatgaagctgctgaaaatatgttagcctttttatgccaacaaggtttttcactagagaatgcattatatgcagtgagtgctgtgagggtgtttactttaggttgcgtattgtttgatcaagagagccaagtcgctaaagaagaaagggaaacacctactactgctagtatgccgccattattgcgacaagtttgggaattaaaggatcaccaaggtgcagagccagccttcttattcggccttgaattgatcatatgcggattagaaaaacaacttaaatgcgaaagtgggtcttaa

SEQ ID NO: 584 - DNA, 627 bp, Artificial Sequence
  synthetic construct; Sulfonylurea responsive repressor
atgggatctagattagataaaagtaaagtgattaacagcgcattagagctgcttaatgaggtcggaatcgaaggtttaacaacccgtaaactcgcccagaagctaggtgtagagcagcctacattgtattggcatgtaaaaaataagcgagctctgctcgacgccttagccattgagatgatggataggcacgcaactcacatgtgccctttagaaggggaaagctggcaagattttttacgtaataatgctaaaagtatgagatgtgctttactaagccatcgcgatggagcaaaagtatggttaggtacacgctggacagaacaacaatatgaaactgctgaaaatatgttagcctttttatgccaacaaggtttttcactagagaatgcattatatgcagtgagtgctgtgagggtgtttactttaggttgcgtattgtttgatcaagagctccaagtcgctaaagaagaaagggaaacacctactactgctagtatgccgccattattgcgacaagtttgggaattaaaggatcaccaaggtgcagagccagccttcttattcggccttgaattgatcatatgcggattagaaaaacaacttaaatgcgaaagtgggtcttaa

SEQ ID NO: 585 - DNA, 627 bp, Artificial Sequence
  synthetic construct; Sulfonylurea responsive repressor
atgggatctagattagataaaagtaaagtgattaacagcgcattagagctgcttaatgaggtcggaatcgaaggtttaacaacccgtaaactcgcccagaagctaggtgtagagcagcctacattgtattggcatgtaaaaaataagcgagctctgctcgacgccttagccattgagatgatggataggcaccaaactcactattgccctttagaaggggaaagctggcaagattttttacgtaataatgctaaaagtatgagatgtgctttactaagccatcgcgatggagcaaaagtatgtttaggtacacgctggacagaaaaacaatatgaaactgctgaaaatcaattagcctttttatgccaacaaggtttttcactagagaatgcattatatgcaatgagtgctgtgaggaactttactttaggttgcgtattgtttgatcaagagagccaagtcgctaaagaagaaagggaaacacctactactgctagtatgccgccattattgcgacaagcttgggaattaaaggatcaccaaggtgcagagccagccttcttattcggccttgaattgatcatatgcggattagaaaaacaacttaaatgcgaaagtgggtcttaa

SEQ ID NO: 586 - DNA, 627 bp, Artificial Sequence
  synthetic construct; Sulfonylurea responsive repressor
atgggatctagattagataaaagtaaagtgattaacagcgcattagagctgcttaatgaggtcggaatcgaaggtttaacaacccgtaaactcgcccagaagctaggtgtagagcagcctacattgtattggcatgtaaaaaataagcgagctctgctcgacgccttagccattgagatgatggataggcaccaaactcactattgccctttagaaggggaaagctggcaagattttttacgtaataatgctaaaagtatgagatgtgctttactaagccatcgcgatggagcaaaagtatgtttaggtacacgctggacagaacaacaatatgaaactgctgaaaatcaattagcctttttatgccaacaaggtttttcactagagaatgcattatatgcagtgagtgctgtgagggtgtttactttaggttgcgtattgtttgatcaagagctccaagtcgctaaagaagaaagggaaacacctactactgctagtatgccgccattattgcgacaaggttgggaattaaaggatcaccaaggtgcagagccagccttcttattcggccttgaattgatcatatgcggattagaaaaacaacttaaatgcgaaagtgggtcttaa

SEQ ID NO: 587 - DNA, 627 bp, Artificial Sequence
  synthetic construct; Sulfonylurea responsive repressor
atgggatctagattagataaaagtaaagtgattaacagcgcattagagctgcttaatgaggtcggaatcgaaggtttaacaacccgtaaactcgcccagaagctaggtgtagagcagcctacattgtattggcatgtaaaaaataagcgagctctgctcgacgccttagccattgagatgatggataggcaccaaactcacatttgccctttagaaggggaaagctggcaagattttttacgtaataatgctaaaagtatgagatgtgctttactaagccatcgcgatggagcaaaagtatgtttaggtacacgctggacagaaaaattgtatgaaactgctgaaaatcaattagcctttttatgccaacaaggtttttcactagagaatgcattatatgcaatgagtgctgtgagggtgtttactttaggttgcgtattgtttgatcaagagctccaagtcgctaaagaagaaagggaaacacctactactgctagtatgccgccattagtccgacaagtttgggaattaaaggatcaccaaggtgcagagccagccttcttattcggccttgaattgatcatatgcggattagaaaaacaacttaaatgcgaaagtgggtcttaa

SEQ ID NO: 588 - DNA, 627 bp, Artificial Sequence
  synthetic construct; Sulfonylurea responsive repressor
atgggatctagattagataaaagtaaagtgattaacagcgcattagagctgcttaatgaggtcggaatcgaaggtttaacaacccgtaaactcgcccagaagctaggtgtagagcagcctacattgtattggcatgtaaaaaataagcgagctctgctcgacgccttagccattgagatgatggataggcaccaaactcacatttgccctttagaaggggaaagctggcaagattttttacgtaataatgctaaaagtatgagatgtgctttactaagccatcgcgatggagcaaaagtatgtttaggtacacgctggacagaaaaacaatatgaaagtgctgaaaatatgttagcctttttatgccaacaaggtttttcactagagaatgcattatatgcagtgagtgctgtgagggtgtttactttaggttgcgtattgtttgatcaagagctccaagtcgctaaagaagaaagggaaacacctactactgctagtatgccgccattagtgcgacaagtttgggaattaaaggatcaccaaggtgcagagccagccttcttattcggccttgaattgatcatatgcggattagaaaaacaacttaaatgcgaaagtgggtcttaa

SEQ ID NO: 589 - DNA, 627 bp, Artificial Sequence
  synthetic construct; Sulfonylurea responsive repressor
atgggatctagattagataaaagtaaagtgattaacagcgcattagagctgcttaatgaggtcggaatcgaaggtttaacaacccgtaaactcgcccagaagctaggtgtagagcagcctacattgtattggcatgtaaaaaataagcgagctctgctcgacgccttagccattgagatgatggataggcacgcaactcacttgtgccctttagaaggggaaagctggcaagattttttacgtaataatgctaaaagtatgagatgtgctttactaagccatcgcgatggagcaaaagtatgtttaggtacacgctggacagaaaaacaatatgaagctgctgaaaatcaattagcctttttatgccaacaaggtttttcactagagaatgcattatatgcagtgagtgctgtgagggtgtttactttaggttgcgtattgtttgatcaagagagccaagtcgctaaagaagaaagggaaacacctactactgctagtatgccgccattattgcgacaagtttgggaattaaaggatcaccaaggtgcagagccagccttcttattcggccttgaattgatcatatgcggattagaaaaacaacttaaatgcgaaagtgggtcttaa

SEQ ID NO: 590 - DNA, 627 bp, Artificial Sequence
  synthetic construct; Sulfonylurea responsive repressor
atgggatctagattagataaaagtaaagtgattaacagcgcattagagctgcttaatgaggtcggaatcgaaggtttaacaacccgtaaactcgcccagaagctaggtgtagagcagcctacattgtattggcatgtaaaaaataagcgagctctgctcgacgccttagccattgagatgatggataggcacgcaactcacttgtgccctttagaaggggaaagctggcaagattttttacgtaataatgctaaaagtatgagatgtgctttactaagccatcgcgatggagcaaaagtatgtttaggtacacgctggacagaacaattgtatgaaactgctgaaaatatgttagcctttttatgccaacaaggtttttcactagagaatgcattatatgcagtgagtgctgtgaggaactttactttaggttgcgtattgtttgatcaagagagccaagtcgctaaagaagaaagggaaacacctactactgctagtatgccgccattattgcgacaagtttgggaattaaaggatcaccaaggttcagagccagccttcttattcggccttgaattgatcatatgcggattagaaaaacaacttaaatgcgaaagtgggtcttaa

SEQ ID NO: 591 - DNA, 627 bp, Artificial Sequence
  synthetic construct; Sulfonylurea responsive repressor
atgggatctagattagataaaagtaaagtgattaacagcgcattagagctgcttaatgaggtcggaatcgaaggtttaacaacccgtaaactcgcccagaagctaggtgtagagcagcctacattgtattggcatgtaaaaaataagcgagctctgctcgacgccttagccattgagatgatggataggcaccaaactcacatttgccctttagaaggggaaagctggcaagattttttacgtaataatgctaaaagtatgagatgtgctttactaagccatcgcgatggagcaaaagtatgtttaggtacacggtggacagaaaaacaatatgaaactgctgaaaatatgttagcctttttatgccaacaaggtttttcactagagaatgcattatatgcagtgagtgctgtgagggtgtttactttaggttgcgtattgtttgatcaagagctccaagtcgctaaagaagaaagggaaacacctactactgctagtatgccgccattagtgcgacaagcttgggaattaaaggatcaccaaggtgcagagccagccttcttattcggccttgaattgatcatatgcggattagaaaaacaacttaaatgcgaaagtgggtcttaa

SEQ ID NO: 592 - DNA, 627 bp, Artificial Sequence
  synthetic construct; Sulfonylurea responsive repressor
atgggatctagattagataaaagtaaagtgattaacagcgcattagagctgcttaatgaggtcggaatcgaaggtttaacaacccgtaaactcgcccagaagctaggtgtagagcagcctacattgtattggcatgtaaaaaataagcgagctctgctcgacgccttagccattgagatgatggataggcaccaaactcacatgtgccctttagaaggggaaagctggcaagattttttacgtaataatgctaaaagtatgagatgtgctttactaagccatcgcgatggagcaaaagtatgtttaggtacacgctggacagaacaacaatatgaagctgctgaaaatatgttagcctttttatgccaacaaggtttttcactagagaatgcattatatgcaatgagtgctgtgaggaactttactttaggttgcgtattgtttgatcaagagagccaagtcgctaaagaagaaagggaaacacctactactgctagtatgccgccattattgcgacaagcttgggaattaaaggatcaccaaggtgcagagccagccttcttattcggccttgaattgatcatatgcggattagaaaaacaacttaaatgcgaaagtgggtcttaa

SEQ ID NO: 593 - DNA, 627 bp, Artificial Sequence
  synthetic construct; Sulfonylurea responsive repressor
atgggatctagattagataaaagtaaagtgattaacagcgcattagagctgcttaatgaggtcggaatcgaaggtttaacaacccgtaaactcgcccagaagctaggtgtagagcagcctacattgtattggcatgtaaaaaataagcgagctctgctcgacgccttagccattgagatgatggataggcacgcaactcactattgccctttagaaggggaaagctggcaagattttttacgtaataatgctaaaagtatgagatgtgctttactaagccatcgcgatggagcaaaagtatgtttaggtacacgctggacagaaaaacaatatgaaactgctgaaaatcaattagcctttttatgccaacaaggtttttcactagagaatgcattatatgcaatgagtgctgtgagggtgtttactttaggttgcgtattgtttgatcaagagctccaagtcgctaaagaagaaagggaaacacctactactgctagtatgccgccattagtgcgacaagcttgggaattaaaggatcaccaaggtgcagagccagccttcttattcggccttgaattgatcatatgcggattagaaaaacaacttaaatgcgaaagtgggtcttaa

SEQ ID NO: 594 - DNA, 627 bp, Artificial Sequence
  synthetic construct; Sulfonylurea responsive repressor
atgggatctagattagataaaagtaaagtgattaacagcgcattagagctgcttaatgaggtcggaatcgaaggtttaacaacccgtaaactcgcccagaagctaggtgtagagcagcctacattgtattggcatgtaaaaaataagcgagctctgctcgacgccttagccattgagatgatggataggcaccaaactcactattgccctttagaaggggaaagctggcaagattttttacgtaatactgctaaaagtatgagatgtgctttactaagccatcgcgatggagcaaaagtatgtttaggtacacgctggacagaaaaacaatatgaaactgctgaaaatatgttagcctttttatgccaacaaggtttttcactagagaatgcattatatgcagtgagtgctgtgagggtgtttactttaggttgcgtattgtttgatcaagagagccaagtcgctaaagaagaaagggaaacacctactactgctagtatgccgccattattgcgacaaggtttggaattaaaggatcaccaaggtgcagagccagccttcttattcggccttgaattgatcatatgcggattagaaaaacaacttaaatgcgaaagtgggtcttaa

SEQ ID NO: 595 - DNA, 627 bp, Artificial Sequence
  synthetic construct; Sulfonylurea responsive repressor
  misc_feature (194)..(194): n is a, c, g, or t
atgggatctagattagataaaagtaaagtgattaacagcgcattagagctgcttaatgaggtcggaatcgaaggtttaacaacccgtaaactcgcccagaagctaggtgtagagcagcctacattgtattggcatgtaaaaaataagcgagctctgctcgacgccttagccattgagatgatggataggcaccnaactcactattgccctttagaaggggaaagctggcaagattttttacgtaataatgctaaaagtatgagatgtgctttactaagccatcgcgatggagcaaaagtatgtttaggtacacgctggacagaaaaacattatgaaactgctgaaaatatgttagcctttttatgccaacaaggtttttcactagagaatgcattatatgcaatgagtgctgtgaggaactttactttaggtggcgtattgtttgatcaagagagccaagtcgctaaagaagaaagggaaacacctactactgctagtatgccgccattagcccgacaagtttgggaattaaaggatcaccaaggtgcagagccagccttcttattcggccttgaattgatcatatgcggattagaaaaacaacttaaatgcgaaagtgggtcttaa

SEQ ID NO: 596 - DNA, 627 bp, Artificial Sequence
  synthetic construct; Sulfonylurea responsive repressor
atgggatctagattagataaaagtaaagtgattaacagcgcattagagctgcttaatgaggtcggaatcgaaggtttaacaacccgtaaactcgcccagaagctaggtgtagagcagcctacattgtattggcatgtaaaaaataagcgagctctgctcgacgccttagccattgagatgatggataggcaccaaactcacatttgccctttagaaggggaaagctggcaagattttttacgtaataatgctaaaagtatgagatgtgctttactaagccatcgcgatggagcaaaagtatgtttaggtacacgctggacagaaaaaatgtatgaaactgctgaaaatcaattagcctttttatgccaacaaggtttttcactagagaatgcattatatgcaatgagtgctgtgagggtgtttactttaggttgcgtattgtttgatcaagagctccaagtcgctaaagaagaaagggaaacacctactactgctagtatgccgccattattgcgacaagcttgggaattaaaggatcaccaaggtgcagagccagccttcttattcggccttgaattgatcatatgcggattagaaaaacaacttaaatgcgaaagtgggtcttaa

SEQ ID NO: 597 - DNA, 627 bp, Artificial Sequence
  synthetic construct; Sulfonylurea responsive repressor
atgggatctagattagataaaagtaaagtgattaacagcgcattagagctgcttaatgaggtcggaatcgaaggtttaacaacccgtaaactcgcccagaagctaggtgtagagcagcctacattgtattggcatgtaaaaaataagcgagctctgctcgacgccttagccattgagatgatggataggcaccaaactcactattgccctttagaaggggaaagctggcaagattttttacgtaatactgctaaaagtatgagatgtgctttactaagccatcgcgatggagcaaaagtatgtttaggtacacgctggacagaacaacaatatgaaactgctgaaaatatgttagcctttttatgccaacaaggtttttcactagagaatgcattatatgcagtgagtgctgtgagggtgtttactttaggttgcgtattgtttgatcaagagagccaagtcgctaaagaagaaagggaaacacctactactgctagtatgccgccattattgcgacaagcttgggaattaaaggatcaccaaggtgcagagccagccttcttattcggccttgaattgatcatatgcggattagaaaaacaacttaaatgcgaaagtgggtcttaa

SEQ ID NO: 598 - DNA, 627 bp, Artificial Sequence
  synthetic construct; Sulfonylurea responsive repressor
atgggatctagattagataaaagtaaagtgattaacagcgcattagagctgcttaatgaggtcggaatcgaaggtttaacaacccgtaaactcgcccagaagctaggtgtagagcagcctacattgtattggcatgtaaaaaataagcgagctctgctcgacgccttagccattgagatgatggataggcacgcaactcactattgccctttagaaggggaaagctggcaagattttttacgtaataatgctaaaagtatgagatgtgctttactaagccatcgcgatggagcaaaagtatgtttaggtacacgctggacagaacaacattatgaaactgctgaaaatcaattagcctttttatgccaacaaggtttttcactagagaatgcattatatgcagtgagtgctgtgagggtgtttactttaggttgcgtattgtttgatcaagagagccaagtcgctaaagaagaaagggaaacacctactactgctagtatgccgccattattgcgacaagtttgggaattaaaggatcaccaaggtgcagagccagccttcttattcggccttgaattgatcatatgcggattagaaaaacaacttaaatgcgaaagtgggtcttaa

SEQ ID NO: 599 - DNA, 627 bp, Artificial Sequence
  synthetic construct; Sulfonylurea responsive repressor
atgggatctagattagataaaagtaaagtgattaacagcgcattagagctgcttaatgaggtcggaatcgaaggtttaacaacccgtaaactcgcccagaagctaggtgtagagcagcctacattgtattggcatgtaaaaaataagcgagctctgctcgacgccttagccattgagatgatggataggcacgcaactcacttgtgccctttagaaggggaaagctggcaagattttttacgtaataatgctaaaagtatgagatgtgctttactaagccatcgcgatggagcaaaagtatgtttaggtacacgctggacagaaaaacaatatgaaactgctgaaaatcaattagcctttttatgccaacaaggtttttcactagagaatgcattatatgcagtgagtgctgtgagggtgtttactttaggttgcgtattgtttgatcaagagagccaagtcgctaaagaagaaagggaaacacctactactgctagtatgccgccattattgcgacaagtttgggaattaaaggatcaccaaggtgcagagccagccttcttattcggccttgaattgatcatatgcggattagaaaaacaacttaaatgcgaaagtgggtcttaa

SEQ ID NO: 600 - DNA, 627 bp, Artificial Sequence
  synthetic construct; Sulfonylurea responsive repressor
atgggatctagattagataaaagtaaagtgattaacagcgcattagagctgcttaatgaggtcggaatcgaaggtttaacaacccgtaaactcgcccagaagctaggtgtagagcagcctacattgtattggcatgtaaaaaataagcgagctctgctcgacgccttagccattgagatgatggataggcaccaaactcactattgccctttagaaggggaaagctggcaagattttttacgtaataatgctaaaagtatgagatgtgctttactaagccatcgcgatggagcaaaagtatgtttaggtacacgctggacagaacaacaatatgaaactgctgaaaatatgttagcctttttatgccaacaaggtttttcactagagaatgcattatatgcaatgagtgctgtgagggtgtttactttaggttgcgtattgtttgatcaagagagccaagtcgctaaagaagaaagggaaacacctactactgctagtatgccgccattattgcgacaagctttggaattaaaggatcaccaaggtgcagagccagccttcttattcggccttgaattgatcatatgcggattagaaaaacaacttaaatgcgaaagtgggtcttaa

SEQ ID NO: 601 - DNA, 627 bp, Artificial Sequence
  synthetic construct; Sulfonylurea responsive repressor
atgggatctagattagataaaagtaaagtgattaacagcgcattagagctgcttaatgaggtcggaatcgaaggtttaacaacccgtaaactcgcccagaagctaggtgtagagcagcctacattgtattggcatgtaaaaaataagcgagctctgctcgacgccttagccattgagatgatggataggcaccaaactcacttttgccctttagaaggggaaagctggcaagattttttacgtaatactgctaaaagtatgagatgtgctttactaagccatcgcgatggagcaaaagtatgtttaggtacacgctggacagaacaattgtatgaagctgctgaaaatatgttagcctttttatgccaacaaggtttttcactagagaatgcattatatgcagtgagtgctgtgagggtgtttactttaggttgcgtattgtttgatcaagagagccaagtcgctaaagaagaaagggaaacacctactactgctagtatgccgccattattgcgacaaggttgggaattaaaggatcaccaaggtgcagagccagccttcttattcggccttgaattgatcatatgcggattagaaaaacaacttaaatgcgaaagtgggtcttaa

SEQ ID NO: 602 - DNA, 627 bp, Artificial Sequence
  synthetic construct; Sulfonylurea responsive repressor
atgggatctagattagataaaagtaaagtgattaacagcgcattagagctgcttaatgaggtcggaatcgaaggtttaacaacccgtaaactcgcccagaagctaggtgtagagcagcctacattgtattggcatgtaaaaaataagcgagctctgctcgacgccttagccattgagatgatggataggcacgcaactcacttgtgccctttagaaggggaaagctggcaagattttttacgtaataatgctaaaagtatgagatgtgctttactaagccatcgcgatggagcaaaagtatgtttaggtacacgctggacagaacaattgtatgaaactgctgaaaatcaattagcctttttatgccaacaaggtttttcactagagaatgcattatatgcagtgagtgctgtgagggtgtttactttaggttgcgtattgtttgatcaagagagccaagtcgctaaagaagaaagggaaacacctactactgctagtatgccgccattattgcgacaagtttgggaattaaaggatcaccaaggtgcagagccagccttcttattcggccttgaattgatcatatgcggattagaaaaacaacttaaatgcgaaagtgggtcttaa

SEQ ID NO: 603 - DNA, 627 bp, Artificial Sequence
  synthetic construct; Sulfonylurea responsive repressor
atgggatctagattagataaaagtaaagtgattaacagcgcattagagctgcttaatgaggtcggaatcgaaggtttaacaacccgtaaactcgcccagaagctaggtgtagagcagcctacattgtattggcatgtaaaaaataagcgagctctgctcgacgccttagccattgagatgatggataggcaccaaactcactattgccctttagaaggggaaagctggcaagattttttacgtaataatgctaaaagtatgagatgtgctttactaagccatcgcgatggagcaaaagtatgtttaggtacacgctggacagaacaaatgtatgaaggtgctgaaaatatgttagcctttttatgccaacaaggtttttcactagagaatgcattatatgcagtgagtgctgtgaggaactttactttaggttgcgtattgtttgatcaagagagccaagtcgctaaagaagaaagggaaacacctactactgctagtatgccgccattattgcgacaagcttgggaattaaaggatcaccaaggtgcagagccagccttcttattcggccttgaattgatcatatgcggattagaaaaacaacttaaatgcgaaagtgggtcttaa

SEQ ID NO: 604 - DNA, 627 bp, Artificial Sequence
  synthetic construct; Sulfonylurea responsive repressor
atgggatctagattagataaaagtaaagtgattaacagcgcattagagctgcttaatgaggtcggaatcgaaggtttaacaacccgtaaactcgcccagaagctaggtgtagagcagcctacattgtattggcatgtaaaaaataagcgagctctgctcgacgccttagccattgagatgatggataggcacgcaactcactattgccctttagaaggggaaagctggcaagattttttacgtaataatgctaaaagtatgagatgtgctttactaagccatcgcgatggagcaaaagtatgtttaggtacacgctggacagaacaacaatatgaaactgctgaaaatcaattagcctttttatgccaacaaggtttttcactagagaatgcattatatgcaatgagtgctgtgagggtgtttactttaggttgcgtattgtttgatcaagagagccaagtcgctaaagaagaaagggaaacacctactagtgctagtatgccgccattagtgcgacaagtttgggaattaaaggatcaccaaggtgcagagccagccttcttattcggccttgaattgatcatatgcggattagaaaaacaacttaaatgcgaaagtgggtcttaa

SEQ ID NO: 605 - DNA, 627 bp, Artificial Sequence
  synthetic construct; Sulfonylurea responsive repressor
atgggatctagattagataaaagtaaagtgattaacagcgcattagagctgcttaatgaggtcggaatcgaaggtttaacaacccgtaaactcgcccagaagctaggtgtagagcagcctacattgtattggcatgtaaaaaataagcgagctctgctcgacgccttagccattgagatgatggataggcaccaaactcactattgccctttagaaggggaaagctggcaagattttttacgtaatactgctaaaagtatgagatgtgctttactaagccatcgcgatggagcaaaagtatgtttaggtacacgctggacagaaaaacaatatgaagctgctgaaaatatgttagcctttttatgccaacaaggtttttcactagagaatgcattatatgcaatgagtgctgtgagggtgtttactttaggttgcgtattgtttgatcaagagagccaagtcgctaaagaagaaagggaaacacctactactgctagtatgccgccattattgcgacaagcttgggaattaaaggatcaccaaggtgcagagccagccttcttattcggccttgaattgatcatatgcggattagaaaaacaacttaaatgcgaaagtgggtcttaa

SEQ ID NO: 606 - DNA, 627 bp, Artificial Sequence
  synthetic construct; Sulfonylurea responsive repressor
atgggatctagattagataaaagtaaagtgattaacagcgcattagagctgcttaatgaggtcggaatcgaaggtttaacaacccgtaaactcgcccagaagctaggtgtagagcagcctacattgtattggcatgtaaaaaataagcgagctctgctcgacgccttagccattgagatgatggataggcaccaaactcacttgtgccctttagaaggggaaagctggcaagattttttacgtaataatgctaaaagtatgagatgtgctttactaagccatcgcgatggagcaaaagtatgtttaggtacacgctggacagaacaattgtatgaagctgctgaaaatatgttagcctttttatgccaacaaggtttttcactagagaatgcattatatgcagtgagtgctgtgagggtgtttactttaggttgcgtattgtttgatcaagagagccaagtcgctaaagaagaaagggaaacacctactactgctagtatgccgccattagtgcgacaaggttgggaattaaaggatcaccaaggtgcagagccagccttcttattcggccttgaattgatcatatgcggattagaaaaacaacttaaatgcgaaagtgggtcttaa

SEQ ID NO: 607 - DNA, 627 bp, Artificial Sequence
  synthetic construct; Sulfonylurea responsive repressor
atgggatctagattagataaaagtaaagtgattaacagcgcattagagctgcttaatgaggtcggaatcgaaggtttaacaacccgtaaactcgcccagaagctaggtgtagagcagcctacattgtattggcatgtaaaaaataagcgagctctgctcgacgccttagccattgagatgatggataggcaccaaactcactattgccctttagaaggggaaagctggcaagattttttacgtaatactgctaaaagtatgagatgtgctttactaagccatcgcgatggagcaaaagtatgtttaggtacacgctggacagaacaattgtatgaaactgctgaaaatcaattagcctttttatgccaacaaggtttttcactagagaatgcattatatgcaatgagtgctgtgagggtgtttactttaggttgcgtattgtttgatcaagagagccaagtcgctaaagaagaaagggaaacacctactactgctagtatgccgccattattgcgacaaggttgggaattaaaggatcaccaaggtgcagagccagccttcttattcggccttgaattgatcatatgcggattagaaaaacaacttaaatgcgaaagtgggtcttaa

SEQ ID NO: 608 - DNA, 627 bp, Artificial Sequence
  synthetic construct; Sulfonylurea responsive repressor
atgggatctagattagataaaagtaaagtgattaacagcgcattagagctgcttaatgaggtcggaatcgaaggtttaacaacccgtaaactcgcccagaagctaggtgtagagcagcctacattgtattggcatgtaaaaaataagcgagctctgctcgacgccttagccattgagatgatggataggcaccaaactcactattgccctttagaaggggaaagctggcaagattttttacgtaatactgctaaaagtatgagatgtgctttactaagccatcgcgatggagcaaaagtatgtttaggtacacgctggacagaacaacattatgaagctgctgaaaatatgttagcctttttatgccaacaaggtttttcactagagaatgcattatatgcaatgagtgctgtgagggtgtttactttaggttgcgtattgtttgatcaagagagccaagtcgctaaagaagaaagggaaacacctactactgctagtatgccgccattattgcgacaagcttgggaattaaaggatcaccaaggtgcagagccagccttcttattgggccttgaattgatcatatgcggattagaaaaacaacttaaatgcgaaagtgggtcttaa

SEQ ID NO: 609 - DNA, 627 bp, Artificial Sequence
  synthetic construct; Sulfonylurea responsive repressor
atgggatctagattagataaaagtaaagtgattaacagcgcattagagctgcttaatgaggtcggaatcgaaggtttaacaacccgtaaactcgcccagaagctaggtgtagagcagcctacattgtattggcatgtaaaaaataagcgagctctgctcgacgccttagccattgagatgatggataggcaccaaactcacatgtgccctttagaaggggaaagctggcaagattttttacgtaataatgctaaaagtatgagatgtgctttactaagccatcgcgatggagcaaaagtatgtttaggtacacgctggacagaaaaacaatatgaaggtgctgaaaatcaattagcctttttatgccaacaaggtttttcactagagaatgcattatatgcagtgagtgctgtgagggtgtttactttaggttgcgtattgtttgatcaagagagccaagtcgctaaagaagaaagggaaacacctactactgctagtatgccgccattagtgcgacaagtttgggaattaaaggatcaccaaggtgcagagccagccttcttattcggccttgaattgatcatatgcggattagaaaaacaacttaaatgcgaaagtgggtcttaa

SEQ ID NO: 610 - DNA, 627 bp, Artificial Sequence
  synthetic construct; Sulfonylurea responsive repressor
atgggatctagattagataaaagtaaagtgattaacagcgcattagagctgcttaatgaggtcggaatcgaaggtttaacaacccgtaaactcgcccagaagctaggtgtagagcagcctacattgtattggcatgtaaaaaataagcgagctctgctcgacgccttagccatagagatgatggataggcaccaaactcacatttgccctttagaaggggaaagctggcaagattttttacgtaataatgctaaaagtatgagatgtgctttactaagccatcgcgatggagcaaaagtatgtttaggtacacgctggacagaacaacaatatgaaggtgctgaaaatcaattagcctttttatgccaacaaggtttttcactagagaatgcattatatgcaatgagtgctgtgagggtgtttactttaggttgcgtattgtttgatcaagagagccaagtcgctaaagaagaaagggaaacacctactactgctagtatgccgccattattgcgacaaggttgggaattaaaggatcaccaaggtgcagagccagccttcttattcggccttgaattgatcatatgcggattagaaaaacaacttaaatgcgaaagtgggtcttaa

SEQ ID NO: 611 - DNA, 627 bp, Artificial Sequence
  synthetic construct; Sulfonylurea responsive repressor
atgggatctagattagataaaagtaaagtgattaacagcgcattagagctgcttaatgaggtcggaatcgaaggtttaacaacccgtaaactcgcccagaagctaggtgtagagcagcctacattgtattggcatgtaaaaaataagcgagctctgctcgacgccttagccattgagatgatggataggcacgcaactcacatgtgccctttagaaggggaaagctggcaagattttttacgtaataatgctaaaagtatgagatgtgctttactaagccatcgcgatggagcaaaagtatgtttaggtacacgctggacagaacaacattatgaaactgctgaaaatcaattagcctttttatgccaacaaggtttttcactagagaatgcattatatgcagtgagtgctgtgagggtgtttactttaggttgcgtattgtttgatcaagagagccaagtcgctaaagaagaaagggaaacacctactactgctagtatgccgccattattgcgacaaggttgggaattaaaggatcaccaaggtgcagagccagccttcttattcggccttgaattgatcatatgcggattagaaaaacaacttaaatgcgaaagtgggtcttaa

SEQ ID NO: 612 - DNA, 627 bp, Artificial Sequence
  synthetic construct; Sulfonylurea responsive repressor
atgggatctagattagataaaagtaaagtgattaacagcgcattagagctgcttaatgaggtcggaatcgaaggtttaacaacccgtaaactcgcccagaagctaggtgtagagcagcctacattgtattggcatgtaaaaaataagcgagctctgctcgacgccttagccattgagatgatggataggcacgcaactcacatttgccctttagaaggggaaagctggcaagattttttacgtaataatgctaaaagtatgagatgtgctttactaagccatcgcgatggagcaaaagtatgtttaggtacacgctggacagaacaacaatatgaaactgctgaaaatatgttagcctttttatgccaacaaggtttttcactagagaatgcattatatgcagtgagtgctgtgagggtgtttactttaggttgcgtattgtttgatcaagagagccaagtcgctaaagaagaaagggaaacacctactactgctagtatgccgccattagtgcgacaagctttggaattaaaggatcaccaaggtgcagagccagccttcttattcggccttgaattgatcatatgcggattagaaaaacaacttaaatgcgaaagtgggtcttaa

SEQ ID NO: 613 - DNA, 627 bp, Artificial Sequence
  synthetic construct; Sulfonylurea responsive repressor
atgggatctagattagataaaagtaaagtgattaacagcgcattagagctgcttaatgaggtcggaatcgaaggtttaacaacccgtaaactcgcccagaagctaggtgtagagcagcctacattgtattggcatgtaaaaaataagcgagctctgctcgacgccttagccattgagatgatggataggcacgcaactcacttttgccctttagaaggggaaagctggcaagattttttacgtaataatgctaaaagtatgagatgtgctttactaagccatcgcgatggagcaaaagtatggttaggtacacgctggacagaacaacaatatgaaactgctgaaaatatgttagcctttttatgccaacaaggtttttcactagagaatgcattatatgcagtgagtgctgtgagggtgtttactttaggttgcgtattgtttgatcaagagagacaagtcgctaaagaagaaagggaaacacctactactgctagtatgccgccattattgcgacaagtttgggaattaaaggatcaccaaggtgcagagccagccttcttattcggccttgaattgatcatatgcggattagaaaaacaacttaaatgcgaaagtgggtcttaa

SEQ ID NO: 614 - DNA, 627 bp, Artificial Sequence
  synthetic construct; Sulfonylurea responsive repressor
atgggatctagattagataaaagtaaagtgattaacagcgcattagagctgcttaatgaggtcggaatcgaaggtttaacaacccgtaaactcgcccagaagctaggtgtagagcagcctacattgtattggcatgtaaaaaataagcgagctctgctcgacgccttagccattgagatgatggataggcaccaaactcacttttgccctttagaaggggaaagctggcaagattttttacgtaataatgctaaaagtatgagatgtgctttactaagccatcgcgatggagcaaaagtatgtttaggtacacgctggacagaacaacaatatgaagctgctgaaaatcaattagcctttttatgccaacaaggtttttcactagagaatgcattatatgcaatgagtgctgtgaggaactttactttaggttgcgtattgtttgatcaagagctccaagtcgctaaagaagaaagggaaacacctactactgctagtatgccgccattattgcgacaagtttgggaattaaaggatcaccaaggtgcagagccagccttcttattcggccttgaattgatcatatgcggattagaaaaacaacttaaatgcgaaagtgggtckkra

SEQ ID NO: 615 - DNA, 627 bp, Artificial Sequence
  synthetic construct; Sulfonylurea responsive repressor
atgggatctagattagataaaagtaaagtgattaacagcgcattagagctgcttaatgaggtcggaatcgaaggtttaacaacccgtaaactcgcccagaagctaggtgtagagcagcctacattgtattggcatgtaaaaaataagcgagctctgctcgacgccttagccattgagatgatggataggcaccaaactcacgtttgccctttagaaggggaaagctggcaagattttttacgtaataatgctaaaagtatgagatgtgctttactaagccatcgcgatggagcaaaagtatgtttaggtacacgctggacagaacaaatgtatgaaactgctgaaaatatgttagcctttttatgccaacaaggtttttcactagagaatgcattatatgcaatgagtgctgtgagggtgtttactttaggttgcgtattgtttgatcaagagctccaagtcgctaaagaagaaagggaaacacctactactgctagtatgccgccattattgcgacaagcttgggaattaaaggatcaccaaggtgcagagccagccttcttattcggccttgaattgatcatatgcggattagaaaaacaacttaaatgcgaaagtgggtcttaa

SEQ ID NO: 616 - DNA, 627 bp, Artificial Sequence
  synthetic construct; Sulfonylurea responsive repressor
  misc_feature (437)..(437): n is a, c, g, or t
  misc_feature (602)..(602): n is a, c, g, or t
atgggatctagattagataaaagtaaagtgattaacagcgcattagagctgcttaatgaggtcggaatcgaaggtttaacaacccgtaaactcgcccagaagctaggtgtagagcagcctacattgtattggcatgtaaaaaataagcgagctctgctcgacgccttagccattgagatgatggataggcaccaaactcactattgccctttagaaggggaaagctggcaagattttttacgtaataatgctaaaagtatgagatgtgctttactaagccatcgcgatggagcaaaagtatgtttaggtacacgctggacagaacaacattatgaaactgctgaaaatcaattagcctttttatgccaacaaggtttttcactagagaatgcattatatgcaatgagtgctgtgagggtgtttactttaggttgcgnattgtttgatcaagagagccaagtcgctaaagaagaaagggaaacacctactactgctagtatgccgccattagtgcgacaagtttgggaattaaaggatcaccaaggtgcagagccagccttcttattcggccttgaattgatcatatgcggattagaaaaacnacttaaatgcgaaagtgggtcttaa

SEQ ID NO: 617 - DNA, 627 bp, Artificial Sequence
  synthetic construct; Sulfonylurea responsive repressor
atgggatctagattagataaaagtaaagtgattaacagcgcattagagctgcttaatgaggtcggaatcgaaggtttaacaacccgtaaactcgcccagaagctaggtgtagagcagcctacattgtattggcatgtaaaaaataagcgagctctgctcgacgccttagccattgagatgatggataggcaccaaactcactattgccctttagaaggggaaagctggcaagattttttacgtaatactgctaaaagtatgagatgtgctttactaagccatcgcgatggagcaaaagtatgtttaggtacacgctggacagaacaacattatgaaggtgctgaaaatatgttagcctttttatgccaacaaggtttttcactagagaatgcattatatgcagtgagtgctgtgagggtgtttactttaggttgcgtattgtttgatcaagagctccaagtcgctaaagaagaaagggaaacacctactactgctagtatgccgccattagtgcgacaaggttgggaattaaaggatcaccaaggtgcagagccagccttcttattcggccttgaattgatcatatgcggattagaaaaacaacttaaatgcgaaagtgggtcttaa

SEQ ID NO: 618 - DNA, 627 bp, Artificial Sequence
  synthetic construct; Sulfonylurea responsive repressor
atgggatctagattagataaaagtaaagtgattaacagcgcattagagctgcttaatgaggtcggaatcgaaggtttaacaacccgtaaactcgcccagaagctaggtgtagagcagcctacattgtattggcatgtaaaaaataagcgagctctgctcgacgccttagccattgagatgatggataggcaccaaactcacgtttgccctttagaaggggaaagctggcaagattttttacgtaataatgctaaaagtatgagatgtgctttactaagccatcgcgatggagcaaaagtatgtttaggtacacgctggacagaacaacaatatgaagctgctgaaaatcaattagcctttttatgccaacaaggtttttcactagagaatgcattatatgcaatgagtgctgtgagggtgtttactttaggttgcgtattgtttgatcaagagctccaagtcgctaaagaagaaagggaaacacctactactgctagtatgccgccattattgcgacaagtttgggaattaaaggatcaccaaggtgcagagccagccttcttattcggccttgaattgatcatatgcggattagaaaaacaacttaaatgcgaaagtgggtcttaa

SEQ ID NO: 619 - DNA, 627 bp, Artificial Sequence
  synthetic construct; Sulfonylurea responsive repressor
atgggatctagattagataaaagtaaagtgattaacagcgcattagagctgcttaatgaggtcggaatcgaaggtttaacaacccgtaaactcgcccagaagctaggtgtagagcagcctacattgtattggcatgtaaaaaataagcgagctctgctcgacgccttagccattgagatgatggataggcacgcaactcacttgtgccctttagaaggggaaagctggcaagattttttacgtaatactgctaaaagtatgagatgtgctttactaagccatcgcgatggagcaaaagtatgtttaggtacacgctggacagaacaacaatatgaaagtgctgaaaatatgttagcctttttatgccaacaaggtttttcactagagaatgcattatatgcaatgagtgctgtgagggtgtttactttaggttgcgtattgtttgatcaagagagccaagtcgctaaagaagaaagggaaacacctactactgctagtatgccgccattattgcgacaagcttgggaattaaaggatcaccaaggtgcagagccagccttcttattcggccttgaattgatcatatgcggattagaaaaacaacttaaatgcgaaagtgggtcttaa

SEQ ID NO: 620 - DNA, 627 bp, Artificial Sequence
  synthetic construct; Sulfonylurea responsive repressor
atgggatctagattagataaaagtaaagtgattaacagcgcattagagctgcttaatgaggtcggaatcgaaggtttaacaacccgtaaactcgcccagaagctaggtgtagagcagcctacattgtattggcatgtaaaaaataagcgagctctgctcgacgccttagccattgagatgatggataggcaccaaactcactattgccctttagaaggggaaagctggcaagattttttacgtaatactgctaaaagtatgagatgtgctttactaagccatcgcgatggagcaaaagtatgtttaggtacacgctggacagaacaacaatatgaaagtgctgaaaatcaattagcctttttatgccaacaaggtttttcactagagaatgcattatatgcagtgagtgctgtgagggtgtttactttaggttgcgtattgtttgatcaagagctccaagtcgctaaagaagaaagggaaacacctactactgctagtatgccgccattattgcgacaagtttgggaattaaaggatcaccaaggtgcagagccagccttcttattcggccttgaattgatcatatgcggattagaaaaacaacttaaatgcgaaagtgggtcttaa

SEQ ID NO: 621 - DNA, 627 bp, Artificial Sequence
  synthetic construct; Sulfonylurea responsive repressor
atgggatctagattagataaaagtaaagtgattaacagcgcattagagctgcttaatgaggtcggaatcgaaggtttaacaacccgtaaactcgcccagaagctaggtgtagagcagcctacattgtattggcatgtaaaaaataagcgagctctgctcgacgccttagccattgagatgatggataggcacgcaactcacgtttgccctttagaaggggaaagctggcaagattttttacgtaatactgctaaaagtatgagatgtgctttactaagccatcgcgatggagcaaaagtatgtttaggtacacgctggacagaacaacaatatgaaactgctgaaaatatgttagcctttttatgccaacaaggtttttcactagagaatgcattatatgcaatgagtgctgtgagggtgtttactttaggttgcgtattgtttgatcaagagagccaagtcgctaaagaagaaagggaaacacctactactgctagtatgccgccattattgcgacaagtttgggaattaaaggatcaccaaggtgcagagccagccttcttattcggccttgaattgatcatatgcggattagaaaaacaacttaaatgcgaaagtgggtcttaa

SEQ ID NO: 622 - DNA, 627 bp, Artificial Sequence
  synthetic construct; Sulfonylurea responsive repressor
atgggatctagattagataaaagtaaagtgattaacagcgcattagagctgcttaatgaggtcggaatcgaaggtttaacaacccgtaaactcgcccagaagctaggtgtagagcagcctacattgtattggcatgtaaaaaataagcgagctctgctcgacgcattggccattgagatgctggataggcacgcgactcactattgccctttagaaggggaaagctggcaagattttttacgtaataacgctaaaagtatgagatgtgctttactaagtcatcgcgatggagcaaaagtatgtttaggtacaggctttacagaaaagcaatatgaaactgccgaaaatagtctggcctttttatgccaacaaggtttttcactcgagcacgcaatgtatgcaatgcaggctgctggtatttatactttaggttgcgtattgttggatcaagagcttcaagtcgctaaagaagaaagggaaacacctactactgatagtatgccgccattagtccgacaagttctggaattaaaggatcaccaaggtgcagagccagccttcttattcggccttgaattgatcatatgcggattagaaaaacaacttaaatgtgaaagtgggtcttaa

SEQ ID NO: 623 - DNA, 627 bp, Artificial Sequence
  synthetic construct; Sulfonylurea responsive repressor
atgggatctagattagataaaagtaaagcgattaacagcgcattagagctgcttaatgaggtcggaatcgaaggtttaacaacccgtaaactcgcccagaagctaggtgtagagcagcctacattgtattggcatgtaaaaaataagcgagctctgctcgacgcaatggccattgagatgctggataggcacgcgactcactattgccctttagaaggggaaagctggcaagattttttacgtaataacgctaaaagtatgagatgtgctttactaagtcatcgcgatggagcaaaagtatgtttaggtacaggctttacagaacagcaatatgaagctgccgaaaatagtatggcctttttatgccaacaaggtttttcactagagcacgcactgtatgcaatgcaggctgctggtatttttactttaggttgcgtattgttggatcaagagcttcaagtcgctaaagaagaaagggaaacacctactactgatagtatgccgccattagtccgacaagttctggaattaaaggatcaccaaggtgcagagccagccttcttattcggccttgaattgatcatatgcggattagaaaaacaacttaaatgtgaaagtgggtcttaa

SEQ ID NO: 624 - DNA, 627 bp, Artificial Sequence
  synthetic construct; Sulfonylurea responsive repressor
atgggatctagattagataaaagtaaagtgattaacagcgcattagagctgcttaatgaggtcggaatcgaaggtttaacaacccgtaaactcgcccagaagctaggtgtagagcagcctacattgtattggcatgtaaaaaataagcgagctctgctcgacgcattggccattgagatgctggataggcacgcgactcactattgccctttagaaggggaaagctggcaagattttttacgtaataacgctaaaagtatgagatgtgctttactaagtcatcgcgatggagcaaaagtatgtttaggtacaggctttacagaacagatgtatgaagctgccgaaaatagtatggcctttttatgccaacaaggtttttcactagagcacgcaatgtatgcaatgcaggctgttggtatttatactttaggttgcgtattgttggatcaagagcttcaagtcgctaaagaagaaagggaaacacctactactgatagtatgccgccattagtccgacaagttctggaattaaaggatcaccaaggtgcagagccagccttcttattcggccttgaattgatcatatgcggattagaaatacaacttaaatgtgaaagtgggtcttaa

SEQ ID NO: 625 - DNA, 627 bp, Artificial Sequence
  synthetic construct; Sulfonylurea responsive repressor
atgggatctagattagataaaagtaaagygattaacagcgcattagagctgcttaatgaggtcggaatcgaaggtttaacaacccgtaaactcgcccagaagctaggtgtagagcagcctacattgtattggcatgtaaaaaataagcgagctctgctcgacgcaatggccattgagatgctggataggcacgcgactcactattgccctttagaaggggaaagctggcaagattttttacgtaataacgctaaaagtatgagatgtgctttactaagtcatcgcgatggagcaaaagtatgtttaggtacaggctttacagaacagcaatatgaaactgccgaaaatagtctggcctttttatgccaacaaggtttttcactagagaacgcactgtatgcaatgcaggctgttggtatttatactttaggttgcgtattgttggatcaagagcttcaagtcgctaaagaagaaagggaaacacctactactgatagtatgccgccattagtccgacaagttctggaattaaaggatcaccaaggtgcagagccagccttcttattcggccttgaattgatcatatgcggattagaaaaacaacttaaatgtgaaagtgggtcttaa

SEQ ID NO: 626 - DNA, 627 bp, Artificial Sequence
  synthetic construct; Sulfonylurea responsive repressor
  misc_feature (27)..(27): n is a, c, g, or t
atgggatctagattagataaaagtaanccgattaacagcgcattagagctgcttaatgaggtcggaatcgaaggtttaacaacccgtaaactcgcccagaagctaggtgtagagcagcctacattgtattggcatgtaaaaaataagcgagctctgctcgacgcattggccattgagatgctggataggcacgcgactcactattgccctttagaaggggaaagctggcaagattttttacgtaataacgctaaaagtatgagatgtgctttactaagtcatcgcgatggagcaaaagtatgtttaggtacaggctttacagaacagcaatatgaaagtgccgaaaatagtatggcctttttatgccaacaaggtttttcactagagcacgcactgtatgcaatgcaggctgttggtatttttactttaggttgcgtattgttggatcaagagcttcaagtcgctaaagaagaaagggaaacacctactactgatagtatgccgccattactccgacaagctctggaattaaaggatcaccaaggtgcagagccagccttcttattcggccttgaattgatcatatgcggattagaaaaacaacttaaatgtgaaagtgggtcttaa

SEQ ID NO: 627 - DNA, 627 bp, Artificial Sequence
  synthetic construct; Sulfonylurea responsive repressor
atgggatctagattagataaaagtaaagtgattaacagcgcattagagctgcttaatgaggtcggaatcgaaggtttaacaacccgtaaactcgcccagaagctaggtgtagagcagcctacattgtattggcatgtaaaaaataagcgagctctgctcgacgcaatggccattgagatgctggataggcacgcgactcacatctgccctttagaaggggaaagctggcaagattttttacgtaataacgctaaaagtatgagatgtgctttactaagtcatcgcgatggagcaaaagtatgtttaggtacaggctttacagaacagcaatatgaaagtgccgaaaatagtatggcctttttatgccaacaaggtttttcactagagaacgcaatgtatgcaatgcaggctgttggtatttttactttaggttgcgtattgttggatcaagagcttcaagtcgctaaagaagaaagggaaacacctactactgatagtatgccgccattagtccgacaagttctggaattaaaggatcaccaaggtgcagagccagccttcttattcggccttgaattgatcatatgcggattagaaaaacaacttaaatgtgaaagtgggtcttaa

SEQ ID NO: 628 - DNA, 627 bp, Artificial Sequence
  synthetic construct; Sulfonylurea responsive repressor
atgggatctagattagataaaagtaaagtgattaacagcgcattagagctgcttaatgaggtcggaatcgaaggtttaacaacccgtaaactcgcccagaagctaggtgtagagcagcctacattgtattggcatgtaaaaaataagcgagctctgctcgacgcaatggccattgagatgctggataggcacgcgactcacgtctgccctttagaaggggaaagctggcaagattttttacgtaataacgctaaaagtatgagatgtgctttactaagtcatcgcgatggagcaaaagtatgtttaggtacaggctttacagaacagcaatatgaaactgccgaaaatagtatggcctttttatgccaacaaggtttttcactagagaacgcaatgtatgcaatgcaggctgttggtatttttactttaggttgcgtattgttggatcaagagcttcaagtcgctaaagaagaaagggaaacacctactactgatagtatgccgccattagtccgacaagctctggaattaaaggatcaccaaggtgcagagccagccttcttattcggccttgaattgatcatatgcggattagaaaaacaacttaaatgtgaaagtgggtcttaa

SEQ ID NO: 629 - DNA, 627 bp, Artificial Sequence
  synthetic construct; Sulfonylurea responsive repressor
atgggatctagattagataaaagtaaagtgattaacagcgcattagagctgcttaatgaggtcggaatcgaaggtttaacaacccgtaaactcgcccagaagctaggtgtagagcagcctacattgtattggcatgtaaaaaataagcgagctctgctcgacgcaatggccattgagatgctggataggcacgcgactcactattgccctttagaaggggaaagctggcaagattttttacgtaataacgctaaaagtatgagatgtgctttactaagtcatcgcgatggagcaaaagtatgtttaggtacaggctttacagaacagatgtatgaaactgccgaaaatagtatggcctttttatgccaacaaggtttttcactagagcacgcactgtatgcaatgcaggctgttggtatttatactgtaggttgcgtattgttggatcaagagcttcaagtcgctaaagaagaaagggaaacacctactactgatagtatgccgccattagtccgacaaggtcttgaattaaaggatcaccaaggtgcagagccagccttcttattcggccttgaattgatcatatgcggattagaaaaacaacttaaatgtgaaagtgggtcttaa

SEQ ID NO: 630 - DNA, 627 bp, Artificial Sequence
  synthetic construct; Sulfonylurea responsive repressor
  misc_feature (330)..(330): n is a, c, g, or t
atgggatctagattagataaaagtaaagcgattaacagcgcattagagctgcttaatgaggtcggaatcgaaggtttaacaacccgtaaactcgcccagaagctaggtgtagagcagcctacattgtattggcatgtaaaaaataagcgagctctgctcgacgcaatggccattgagatgctggataggcacgcgactcactattgccctttagaaggggaaagctggcaagattttttacgtaataacgctaaaagtatgagatgtgctttactaagtcatcgcgatggagcaaaagtatgtttaggtacaggctttacagaacagcantatgaagctgccgaaaatagtatggcctttttatgccaacaaggtttttcactagagaacgcaatgtatgcaatgcaggctgttggtatttatactttaggttgcgtattgttggatcaagagcttcaagtcgctaaagaagaaagggaaacacctactactgatagtatgccgccattagtccgacaagttctggaattaaaggatcaccaaggtgcagagccagccttcttattcggccttgaattgatcatatgcggattagaaaaacaacttaaatgtgaaagtgggtcttaa

SEQ ID NO: 631 - DNA, 627 bp, Artificial Sequence
  synthetic construct; Sulfonylurea responsive repressor
  misc_feature (166)..(166): n is a, c, g, or t
  misc_feature (329)..(330): n is a, c, g, or t
  misc_feature (413)..(413): n is a, c, g, or t
  misc_feature (415)..(415): n is a, c, g, or t
atgggatctagattagataaaagtaaagtgattaacagcgcattagagctgcttaatgaggtcggaatcgaaggtttaacaacccgtaaactcgcccagaagctaggtgtagagcagcctacattgtattggcatgtaaaaaataagcgagctctgctcgacgcantggccattgagatgctggataggcacgcgactcactattgccctttagaaggggaaagctggcaagattttttacgtaataacgctaaaagtatgagatgtgctttactaagtcatcgcgatggagcaaaagtatgtttaggtacaggctttacagaacagcnntatgaaactgccgaaaatagtctggcctttttatgccaacaaggtttttcactagagaacgcaatgtatgcaatgcaggctgntngtatttatactttaggttgcgtattgttggatcaagagcttcaagtcgctaaagaagaaagggaaacacctactactgatagtatgccgccattagtccgacaagctctggaattaaaggatcaccaaggtgcagagccagccttcttattcggccttgaattgatcatatgcggattagaaaaacaacttaaatgtgaaagtgggtcttaa

SEQ ID NO: 632 - DNA, 627 bp, Artificial Sequence
  synthetic construct; Sulfonylurea responsive repressor
atgggatctagattagataaaagtaaagtgattaacagcgcattagagctgcttaatgaggtcggaatcgaaggtttaacaacccgtaaactcgcccagaagctaggtgtagagcagcctacattgtattggcatgtaaaaaataagcgagctctgctcgacgcaatggccattgagatgctggataggcacgcgactcactatggccctttagaaggggaaagctggcaagattttttacgtaataacgctaaaagtatgagatgtgctttactaagtcatcgcgatggagcaaaagtatgtttaggtacaggctttacagaacagcaatatgaaactgccgaaaatagtatggcctttttatgccaacaaggtttttcactagagaacgcaatgtatgcaatgcaggctgtttgtatttatactttaggttgcgtattgttggatcaagagcttcaagtcgctaaagaagaaagggaaacacctactacagatagtatgccgccattagtccgacaagttctggaattaaaggatcaccaaggtgcagagccagccttcttattcggccttgaattgatcatatgcggattagaaaaacaacttaaatgtgaaagtgggtcttaa

SEQ ID NO: 633 - DNA, 627 bp, Artificial Sequence
  synthetic construct; Sulfonylurea responsive repressor
atgggatctagattagataaaagtaaagygattaacagcgcattagagctgcttaatgaggtcggaatcgaaggtttaacaacccgtaaactcgcccagaagctaggtgtagagcagcctacattgtattggcatgtaaaaaataagcgagctctgctcgacgcaatggccattgagatgctggataggcacgcgactcactattgccctttagaaggggaaagctggcaagattttttacgtaataacgctaaaagtatgagatgtgctttactaagtcatcgcgatggagcaaaagtatgtttaggtacaggctttacagaaaagatgtatgaaggtgccgaaaatagtatggcctttttatgccaacaaggtttttcactagagcacgcaatgtatgcaatgcaggctgctggtatttttactttaggttgcgtattgttggatcaagagcttcaagtcgctaaagaagaaagggaaacacctactactgatagtatgccgccattagtccgacaagctctggaattaaaggatcaccaaggtgcagagccagccttcttattcggccttgaattgatcatatgcggattagaaaaacaacttaaatgtgaaagtgggtcttaa

SEQ ID NO: 634 - DNA, 627 bp, Artificial Sequence
  synthetic construct; Sulfonylurea responsive repressor
atgggatctagattagataaaagtaaagtgattaacagcgcattagagctgcttaatgaggtcggaatcgaaggtttaacaacccgtaaactcgcccagaagctaggtgtagagcagcctacattgtattggcatgtaaaaaataagcgagctctgctcgacgcaatggccattgagatgctggataggcacgcgactcactattgccctttagaaggggaaagctggcaagattttttacgtaataacgctaaaagtatgagatgtgctttactaagtcatcgcgatggagcaaaagtatgtttaggtacaggctttacagaacagcaatatgaaactgccgaaaatagtctggcctttttatgccaacaaggtttttcactagagcacgcaatgtatgcaatgcaggctgttggtatttttactttaggttgcgtattgttggatcaagagcttcaagtcgctaaagaagaaagggaaacacctactactgatagtatgccgccattagtccgacaagctctggaattaaaggatcaccaaggtgcagagccagccttcttattcggccttgaattgatcatatgcggattagaaaaacaacttaaatgtgaaagtgggtcttaa

SEQ ID NO: 635 - DNA, 627 bp, Artificial Sequence
  synthetic construct; Sulfonylurea responsive repressor
atgggatctagattagataaaagtaaagcgattaacagcgcattagagctgcttaatgaggtcggaatcgaaggtttaacaacccgtaaactcgcccagaagctaggtgtagagcagcctacattgtattggcatgtaaaaaataagcgagctctgctcgacgcaatggccattgagatgctggataggcacgcgactcacgtctgccctttagaaggggaaagctggcaagattttttacgtaataacgctaaaattatgagatgtgctttactaagtcatcgcgatggagcaaaagtatgtttaggtacaggctttacagaacagcaatatgaaactgccgaaaatagtctggcctttttatgccaacaaggtttttcactagagcacgcactgtatgcaatgcaggctgctggtatttttactttaggttgcgtattgttggatcaagagcttcaagtcgctaaagaagaaagggaaacacctactactgatagtatgccgccattagtccgacaagctctggaattaaatgatcaccaaggtgcagagccagccttcttattcggccttgaattgatcatatgcggattagaaaaacaacttaaatgtgaaagtgggtcttaa

SEQ ID NO: 636 - DNA, 627 bp, Artificial Sequence
  synthetic construct; Sulfonylurea responsive repressor
atgggatctagattagataaaagtaaagcgattaacagcgcattagagctgcttaatgaggtcggaatcgaaggtttaacaacccgtaaactcgcccagaagctaggtgtagagcagcctacattgtattggcatgtaaaaaataagcgagctctgctcgacgcattggccattgagatgctggataggcacgcgactcactattgccctttagaaggggaaagctggcaagattttttacgtaataacgctaaaagtatgagatgtgctttactaagtcatcgcgatggagcaaaagtatgtttaggtacaggctttacagaacagatgtatgaaactgccgaaaatagtatggcctttttatgccaacaaggtttttcactagagaacgcaatgtatgcaatgcaggctgctggtatttatactttaggttgcgtattgttggatcaagagcttcaagtcgctaaagaagaaagggaaacacctactactgatagtatgccgccattagtccgacaagttctggaattaaaggatcaccaaggtgcagagccagccttcttattcggccttgaattgatcatatgcggattagaaaaacaacttaaatgtgaaagtgggtcttaa

SEQ ID NO: 637 - DNA, 627 bp, Artificial Sequence
  synthetic construct; Sulfonylurea responsive repressor
atgggatctagattagataaaagtaaagtgattaacagcgcattagagctgcttaatgaggtcggaatcgaaggtttaacaacccgtaaactcgcccagaagctaggtgtagagcagcctacattgtattggcatgtaaaaaataagcgagctctgctcgacgcaatggccattgagatgctggataggcacgcgactcactattgccctttagaagggaaaagctggcaagattttttacgtaataacgctaaaagtatgagatgtgctttactaagtcatcgcgatggagcaaaagtatgtttaggtacaggctttacagaacagcaatatgaaagtgccgaaaatagtatggcctttttatgccaacaaggtttttcactagagcacgcaatgtatgcaatgcaggctgctggtatttttactttaggttgcgtattgttggatcaagagcttcaagtcgctaaagaagaaagggaaacacctactactgatagtatgccgccattactccgacaagctctggaattaaaggatcaccaaggtgcagagccagccttcttattcggccttgaattgatcatatgcggattagaaaaacaacttaaatgtgaaagtgggtcttaa

SEQ ID NO: 638 - DNA, 627 bp, Artificial Sequence
  synthetic construct; Sulfonylurea responsive repressor
atgggatctagattagataaaagtaaagygattaacagcgcattagagctgcttaatgaggtcggaatcgaaggtttaacaacccgtaaactcgcccagaagctaggtgtagagcagcctacattgtattggcatgtaaaaaataagcgagctctgctcgacgcattggccattgagatgctggataggcacgcgactcactattgccctttagaaggggaaagctggcaagattttttacgtaataacgctaaaagtatgagatgtgctttactaagtcatcgcgatggagcaaaagtatgtttaggtacaggctttacagaacagatgtatgaaagtgccgaaaatagtctggcctttttatgccaacaaggtttttcactagagcacgcaatgtatgcaatgcaggctgctggtatttatactttaggttgcgtattgttggatcaagagcttcaagtcgctaaagaagaaagggaaacacctactactgatagtatgccgccattagtccgacaaggtctggaattaaaggatcaccaaggtgcagagccagccttcttattcggccttgaattgatcatatgcggattagaaaaacaacttaaatgtgaaagtgggtcttaa

SEQ ID NO: 639 - DNA, 627 bp, Artificial Sequence
  synthetic construct; Sulfonylurea responsive repressor
atgggatctagattagataaaagtaaagcgattaacagcgcattagagctgcttaatgaggtcggaatcgaaggtttaacaacccgtaaactcgcccagaagctaggtgtagagcagcctacattgtattggcatgtaaaaaataagcgagctctgctcgacgcaatggccattgagatgctggataggcacgcgactcactattgccctttagaaggggaaagctggcaagattttttacgtaataacgctaaaagtatgagatgtgctttactaagtcatcgcgatggagcaaaagtatgtttaggtacaggctttacagaacagcaatatgaaggtgccgaaaatagtatggcctttttatgccaacaaggtttttcactagagaacgcaatgtatgcaatgcaggctgttggtatttttactttaggttgcgtattgttggatcaagagcttcaagtcgctaaagaagaaagggaaacacctactactgatagtatgccgccattagtccgacaaggtctggaattaaaggatcaccaaggtgcagagccagccttcttattcggccttgaattgatcatatgcggattagaaaaacaacttaaatgtgaaagtgggtcttaa

SEQ ID NO: 640 - DNA, 627 bp, Artificial Sequence
  synthetic construct; Sulfonylurea responsive repressor
atgggatctagattagataaaagtaaagygattaacagcgcattagagctgcttaatgaggtcggaatcgaaggtttaacaacccgtaaactcgcccagaagctaggtgtagagcagcctacattgtattggcatgtaaaaaataagcgagctctgctcgacgcaatggccattgagatgctggataggcacgcgactcactattgccctttagaaggggaaagctggcaagattttttacgtaataacgctaaaagtatgagatgtgctttactaagtcatcgcgatggagcaaaagtatgtttaggtacaggctttacagaacagcaatatgaaactgccgaaaatagtctggcctttttatgccaacaaggtttttcactagagcacgcactgtatgcaatgcaggctgttggtatttatactttaggttgcgtattgttggatcaagagcttcaagtcgctaaagaagaaagggaaacacctactactgatagtatgccgccattagctcgacaagctctggaattaaaggatcaccaaggtgcagagccagccttcttattcggccttgaattgatcatatgcggattagaaaaacaacttaaatgtgaaagtgggtcttaa

SEQ ID NO: 641 - DNA, 627 bp, Artificial Sequence
  synthetic construct; Sulfonylurea responsive repressor
atgggatctagattagataaaagtaaagygattaacagcgcattagagctgcttaatgaggtcggaatcgaaggtttaacaacccgtaaactcgcccagaagctaggtgtagagcagcctacattgtattggcatgtaaaaaataagcgagctctgctcgacgcattggccattgagatgctggataggcacgcgactcactattgccctttagaaggggaaagctggcaagattttttacgtaataacgctaaaagtatgagatgtgctttactaagtcatcgcgatggagcaaaagtatgtttaggtacaggctttacagaacagcactatgaaactgccgaaaatagtatggcctttttatgccaacaaggtttttcactagagaacgcactgtatgcaatgcaggctgttggtatttttactttaggttgcgtattgttggatcaagagcttcaagtcgctaaagaagaaagggaaacacctactactgatagtatgccgccattagtccgacaagctctggaattaaaggatcaccaaggtgcagagccagccttcttattcggccttgaattgatcatatgcggattagaaaaacaacttaaatgtgaaagtgggtcttaa

SEQ ID NO: 642 - DNA, 627 bp, Artificial Sequence
  synthetic construct; Sulfonylurea responsive repressor
  misc_feature (29)..(29): n is a, c, g, or t
atgggatctagattagataaaagtaaagngattaacagcgcattagagctgcttaatgaggtcggaatcgaaggtttaacaacccgtaaactcgcccagaagctaggtgtagagcagcctacattgtattggcatgtaaaaaataagcgagctctgctcgacgcaatggccattgagatgctggataggcacgcgactcactattgccctttagaaggggaaagctggcaagattttttacgtaataacgctaaaagtatgagatgtgctttactaagtcatcgcgatggagcaaaagtatgtttaggtacaggctttacagaacagcaatatgaaagtgccgaaaatagtatggcctttttatgccaacaaggtttttcactagagaacgcaatgtatgcaatgcaggctgttggtatttatactttaggttgcgtattgttggatcaagagcttcaagtcgctaaagaagaaagggaaacacctactactgatagtatgccgccattactccgacaagttctggaattaaaggatcaccaaggtgcagagccagccttcttattcggccttgaattgatcatatgcggattagaaaaacaacttaaatgtgaaagtgggtcttaa

SEQ ID NO: 643 - DNA, 627 bp, Artificial Sequence
  synthetic construct; Sulfonylurea responsive repressor
atgggatctagattagataaaagtaaagygattaacagcgcattagagctgcttaatgaggtcggaatcgaaggtttaacaacccgtaaactcgcccagaagctaggtgtagagcagcctacattgtattggcatgtaaaaaataagcgagctctgctcgacgcattggccattgagatgctggataggcacgcgactcactattgccctttagaaggggaaagctggcaagattttttacgtaataacgctaaaagtatgagatgtgctttactaagtcatcgcgatggagcaaaagtatgtttaggtacaggctttacagaaaagcaatatgaagctgccgaaaatagtctggcctttttatgccaacaaggtttttcactagagcacgcactgtatgcaatgcaggctgctggtatttatactttaggttgcgtattgttggatcaagagcttcaagtcgctaaagaagaaagggaaacacctactactgatagtatgccgccattagtccgacaagctctggaattaaaggatcaccaaggtgcagagccagccttcttattcggccttgaattgatcatatgcggattagaaaaacaacttaaatgtgaaagtgggtcttaa

SEQ ID NO: 644 - DNA, 627 bp, Artificial Sequence
  synthetic construct; Sulfonylurea responsive repressor
atgggatctagattagataaaagtaaagtgattaacagcgcattagagctgcttaatgaggtcggaatcgaaggtttaacaacccgtaaactcgcccagaagctaggtgtagagcagcctacattgtattggcatgtaaaaaataagcgagctctgctcgacgcaatggccattgagatgctggataggcacgcgactcactattgccctttagaaggggaaagctggcaagattttttacgtaataacgctaaaagtatgagatgtgctttactaagtcatcgcgatggagcaaaagtatgtttaggtacaggctttacagaacagcactatgaaactgccgaaaatagtatggcctttttatgccaacaaggtttttcactagagcacgcactgtatgcaatgcaggctgctggtatttatactttaggttgcgtattgttggatcaagagcttcaagtcgctaaagaagaaagggaaacacctactactgatagtatgccgccattagtccgacaagctctggaattaaaggatcaccaaggtgcagagccagccttcttattcggccttgaattgatcatatgcggattagaaaaacaacttaaatgtgaaagtgggtcttaa

SEQ ID NO: 645 - DNA, 627 bp, Artificial Sequence
  synthetic construct; Sulfonylurea responsive repressor
atgggatctagattagataaaagtaaagygattaacagcgcattagagctgcttaatgaggtcggaatcgaaggtttaacaacccgtaaactcgcccagaagctaggtgtagagcagcctacattgtattggcatgtaaaaaataagcgagctctgctcgacgcaatggccattgagatgctggataggcacgcgacacactattgccctttagaaggggaaagctggcaagattttttacgtaataacgctaaaagtatgagatgtgctttactaagtcatcgcgatggagcaaaagtatgtttaggtacaggctttacagaacagcactatgaaactgccgaaaatagtatggcctttttatgccaacaaggtttttcactagagaacgcaatgtatgcaatgcaggctgttggtatttatactttaggttgcgtattgttggatcaagagcttcaagtcgctaaagaagaaagggaaacacctactactgatagtatgccgccattagtccgacaagctctggaattaaaggatcaccaaggtgcagagccagccttcttattcggccttgaattgatcatatgcggattagaaaaacaacttaaatgtgaaagtgggtcttaa

SEQ ID NO: 646 - DNA, 627 bp, Artificial Sequence
  synthetic construct; Sulfonylurea responsive repressor
atgggatctagattagataaaagtaaagtgattaacagcgcattagagctgcttaatgaggtcggaatcgaaggtttaacaacccgtaaactcgcccagaagctaggtgtagagcagcctacattgtattggcatgtaaaaaataagcgagctctgcttgacgcaatggccattgagatgctggataggcacgcgactcactattgccctttagaaggggaaagctggcaagattttttacgtaataacgctaaaagtatgagatgtgctttactaagtcatcgcgatggagcaaaagtatgtttaggtacaggctttacagaacagcaatatgaaactgccgaaaatagtatggcctttttatgcaaacaaggtttttcactagagaacgcaatgtatgcaatgcaggctgttggtatttatactttaggttgcgtattgttggatcaagagcttcaagtcgctaaagaagaaagggaaacacctactactgatagtatgccgccattagtccgacaagttctggaattaaaggatcaccaaggtgcagagccagccttcttattcggccttgaattgatcatatgcggattagaaaaacaacttaaatgtgaaagtgggtcttaa

SEQ ID NO: 647 - DNA, 627 bp, Artificial Sequence
  synthetic construct; Sulfonylurea responsive repressor
  misc_feature (166)..(166): n is a, c, g, or t
  misc_feature (338)..(338): n is a, c, g, or t
  misc_feature (352)..(352): n is a, c, g, or t
  misc_feature (521)..(521): n is a, c, g, or t
atgggatctagattagataaaagtaaagtgattaacagcgcattagagctgcttaatgaggtcggaatcgaaggtttaacaacccgtaaactcgcccagaagctaggtgtagagcagcctacattgtattggcatgtaaaaaataagcgagctctgctcgacgcantggccattgagatgctggataggcacgcgactcactattgccctttagaaggggaaagctggcaagattttttacgtaataacgctaaaagtatgagatgtgctttactaagtcatcgcgatggagcaaaagtatgtttaggtacaggctttacagaacagcactatgaaantgccgaaaatagtntggcctttttatgccaacaaggtttttcactagagcacgcactgtatgcaatgcaggctgttggtatttatactttaggttgcgtattgttggatcaagagcttcaagtcgctaaagaagaaagggaaacacctactactgatagtatgccgccattagtccgacaagntctggaattaaaggatcaccaaggtgcagagccagccttcttattcggccttgaattgatcatatgcggattagaaaaacaacttaaatgtgaaagtgggtcttaa

SEQ ID NO: 648 - DNA, 627 bp, Artificial Sequence
  synthetic construct; Sulfonylurea responsive repressor
atgggatctagattagataaaagtaaagtgattaacagcgcattagagctgcttaatgaggtcggaatcgaaggtttaacaacccgtaaactcgcccagaagctaggtgtagagcagcctacattgtattggcatgtaaaaaataagcgagctctgctcgacgcattggccattgagatgctggataggcacgcgactcactattgccctttagaaggggaaagctggcaagattttttacgtaataacgctaaaagtatgagatgtgctttactaagtcatcgcgatggagcaaaagtatgtttaggtacaggctttacagaacagcactatgaaagtgccgaaaatagtctggcctttttatgccaacaaggtttttcactagagaacgcaatgtatgcaatgcaggctgttggtatttttactttaggttgcgtattgttggatcaagagcttcaagtcgctaaagaagaaagggaaacacctactactgatagtatgccgccattagtccgacaagttctggaattaaaggatcaccaaggtgcagagccagccttcttattcggccttgaattgatcatatgcggattagaaaaacaacttaaatgtgaaagtgggtcttaa

SEQ ID NO: 649 - DNA, 627 bp, Artificial Sequence
  synthetic construct; Sulfonylurea responsive repressor
atgggatctagattagataaaagtaaagcgattaacagcgcattagagctgcttaatgaggtcggaatcgaaggtttaacaacccgtaaactcgcccagaagctaggtgtagagcagcctacattgtattggcatgtaaaaaataagcgagctctgctcgacgcaatggccattgagatgctggataggcacgcgactcactattgccctttagaaggggaaagctggcaagattttttacgtaataacgctaaaagtatgagatgtgctttactaagtcatcgcgatggagcaaaagtatgtttaggtacaggctttacagaacagcaatatgaaactgccgaaaatagtctggcctttttatgccaacaaggtttttcactagagaacgcactgtatgcaatgcaggctgttggtatttatactttaggttgcgtattgttggatcaagagcttcaagtcgctaaagaagaaagggaaacacctactactgatagtatgccgccattagtccgccaagttctggaattaaaggatcaccaaggtgcagagccagccttcttattcggccttgaattgatcatatgcggattagaaaaacaacttaaatgtgaaagtgggtcttaa

SEQ ID NO: 650 - DNA, 627 bp, Artificial Sequence
  synthetic construct; Sulfonylurea responsive repressor
atgggatctagattagataaaagtaaagtgattaacagcgcattagagctgcttaatgaggtcggaatcgaaggtttaacaacccgtaaactcgcccagaagctaggtgtagagcagcctacattgtattggcatgtaaaaaataagcgagctctgctcgacgcaatggccattgagatgctggataggcacgcgactcactattgccctttagaaggggaaagctggcaagattttttacgtaataacgctaaaagtatgagatgtgctttactaagtcatcgcgatggagcaaaagtatgtttaggtacaggctttacagaacagcaatatgaagctgccgaaaatagtatggcctttttatgccaacaagatttttcactagagcacgcaatgtatgcaatgcaggctgttggtatttatactttaggttgcgtattgttggatcaagagcttcaagtcgctaaagaagaaagggaaacacctactactgatagtatgccgccattagtccgacaaggtctggaattaaaggatcaccaaggtgcagagccagccttcttattcggccttgaattgatcatatgcggattagaaaaacaacttaaatgtgaaagtgggtcttaa

SEQ ID NO: 651 - DNA, 627 bp, Artificial Sequence
  synthetic construct; Sulfonylurea responsive repressor
  misc_feature (337)..(338): n is a, c, g, or t
atgggatctagattagataaaagtaaagtgattaacagcgcattagagctgcttaatgaggtcggaatcgaaggtttaacaacccgtaaactcgcccagaagctaggtgtagagcagcctacattgtattggcatgtaaaaaataagcgagctctgctcgacgcaatggccattgagatgctggataggcacgcgactcactattgccctttagaagggaaaagctggcaagattttttacgtaataacgctaaaagtatgagatgtgctttactaagtcatcgcgatggagcaaaagtatgtttaggtacaggctttacagaacagcactatgaanntgccgaaaatagtatggcctttttatgccaacaaggtttttcactagagcacgcaatgtatgcaatgcaggctgctggtatttttactttaggttgcgtattgttggatcaagagcttcaagtcgctaaagaagaaagggaaacacctactactgatagtatgccgccattactccgacaagctctggaattaaaggatcaccaaggtgcagagccagccttcttattcggccttgaattgatcatatgcggattagaaaaacaacttaaatgtgaaagtgggtcttaa

SEQ ID NO: 652 - DNA, 627 bp, Artificial Sequence
  synthetic construct; Sulfonylurea responsive repressor
atgggatctagattagataaaagtaaagtgattaacagcgcattagagctgcttaatgaggtcggaatcgaaggtttaacaacccgtaaactcgcccagaagctaggtgtagagcagcctacattgtattggcatgtaaaaaataagcgagctctgctcgacgcaatggccattgagatgctggataggcacgcgactcactattgccctttagaaggggaaagctggcaagattttttacgtaataacgctaaaagtatgagatgtgctttactaagtcatcgcgatggagcaaaagtatgtttaggtacaggctttacagaacagcaatatgaaactgccgaaaatagtctggcctttttatgccaacaaggtttttcactagagcacgcaatgtatgcaatgcaggctgctggtatttatactttaggttgcgtattgttggatcaagagcttcaagtcgctaaagaagaaagggaaacacctactactgatagtatgccgccattagtccgacaagctctggaattaaaggatcaccaaggtgcagagccagccttcttattcggccttgaattgatcatatgcggattagaaaaacaacttaaatgtgaaagtgggtcttaa

SEQ ID NO: 653 - DNA, 627 bp, Artificial Sequence
  synthetic construct; Sulfonylurea responsive repressor
atgggatctagattagataaaagtaaagygattaacagcgcattagagctgcttaatgaggtcggaatcgaaggtttaacaacccgtaaactcgcccagaagctaggtgtagagcagcctacattgtattggcatgtaaaaaataagcgagctctgctcgacgcaatggccattgagatgctggataggcacgcgactcactattgccctttagaaggggaaagctggcaagattttttacgtaataacgctaaaagtatgagatgtgctttactaagtcatcgcgatggagcaaaagtatgtttaggtacaggctttacagaacagcaatatgaaactgccgaaaatagtatggcctttttatgccaacaaggtttttcactagagaacgcactgtatgcaatgcaggctgttggtatttatactttaggttgcgtattgttggatcaagagcttcaagtcgctaaagaagaaagggaaacacctactactgatagtatgccgccattagtccgacaagctctggaattaaaggatcaccaaggtgcagagccagccttcttattcggccttgaattgatcatatgcggattagaaaaacaacttaaatgtgaaagtgggtcttaa

SEQ ID NO: 654 - DNA, 627 bp, Artificial Sequence
  synthetic construct; Sulfonylurea responsive repressor
atgggatctagattagataaaagtaaagcgattaacagcgcattagagctgcttaatgaggtcggaatcgaaggtttaacaacccgtaaactcgcccagaagctaggtgtagagcagcctacattgtattggcatgtaaaaaataagcgagctctgctcgacgcattggccattgagatgctggataggcacgcgactcactattgccctttagaaggggaaagctggcaagattttttacgtaataacgctaaaagtatgagatgtgctttactaagtcatcgcgatggagcaaaagtatgtttaggtacaggctttacagaaaagcactatgaaactgccgaaaatagtatggcctttttatgccaacaaggtttttcactagagcacgcaatgtatgcaatgcaggctgttggtatttatactttaggttgcgtattgttggatcaagagcttcaagtcgctaaagaagaaagggaaacacctactactgatagtatgccgccattagtccgacaagttctggaattaaaggatcaccaaggtgcagagccagccttcttattcggccttgaattgatcatatgcggattagaaaaacaacttaaatgtgaaagtgggtcttaa

SEQ ID NO: 655 - DNA, 627 bp, Artificial Sequence
  synthetic construct; Sulfonylurea responsive repressor
atgggatctagattagataaaagtaaagygattaacagcgcattagagctgcttaatgaggtcggaatcgaaggtttaacaacccgtaaactcgcccagaagctaggtgtagagcagcctacattgtattggcatgtaaaaaataagcgagctctgctcgacgcattggccattgagatgctggataggcacgcgactcactattgccctttagaaggggaaagctggcaagattttttacgtaataacgctaaaagtatgagatgtgctttactaagtcatcgcgatggagcaaaagtatgtttaggtacaggctttacagaaaagcaatatgaagctgccgaaaatagtatggcctttttatgccaacaaggtttttcactagagcacgcaatgtatgcaatgcaggctgctggtatttatactttaggttgcgtattgttggatcaagagcttcaagtcgctaaagaagaaagggaaacacctactactgatagtatgccgccattagtccgacaagttctggaattaaaggatcaccaaggtgcagagccagccttcttattcggccttgaattgatcatatgcggattagaaaaacaacttaaatgtgaaagtgggtcttaa

SEQ ID NO: 656 - DNA, 627 bp, Artificial Sequence
  synthetic construct; Sulfonylurea responsive repressor
atgggatctagattagataaaagtaaagygattaacagcgcattagagctgcttaatgaggtcggaatcgaaggtttaacaacccgtaaactcgcccagaagctaggtgtagagcagcctacattgtattggcatgtaaaaaataagcgagctctgctcgacgcaatggccattgagatgctggataggcacgcgactcactattgccctttagaaggggaaagctggcaagattttttacgtaataacgctaaaagtatgagatgtgctttactaagtcatcgcgatggagcaaaagtatgtttaggtacaggctttacagaacagcaatatgaaactgccgaaaatagtatggcctttttatgccaacaaggtttttcactagagaacgcaatgtatgcaatgcaggctgcttgtatttatactttaggttgcgtattgttggatcaagagcttcaagtcgctaaagaagaaagggaaacacctactactgatagtatgccgccattagtccgacaagttctggaattaaaggatcaccaaggtgcagagccagccttcttattcggccttgaattgatcatatgcggattagaaaaacaacttaaatgtgaaagtgggtcttaa

SEQ ID NO: 657 - DNA, 627 bp, Artificial Sequence
  synthetic construct; Sulfonylurea responsive repressor
atgggatctagattagataaaagtaaagygattaacagcgcattagagctgcttaatgaggtcggaatcgaaggtttaacaacccgtaaactcgcccagaagctaggtgtagagcagcctacattgtattggcatgtaaaaaataagcgagctctgctcgacgcaatggccattgagatgctggataggcacgcgactcactattgccctttagaaggggaaagctggcaagattttttacgtaataacgctaaaagtatgagatgtgctttactaagtcatcgcgatggagcaaaagtatgtttaggtacaggctttacagaacagcaatatgaaactgccgaaaatagtctggcctttttatgccaacaaggtttttcactagagcacgcactgtatgcaatgcaggctgctggtatttttactttaggttgcgtattgttggatcaagagcttcaagtcgctaaagaagaaagggaaacacctactactgatagtatgccgccattagtccgacaagctctggaattaaaggatcaccaaggtgcagagccagccttcttattcggccttgaattgatcatatgcggattagaaaaacaacttaaatgtgaaagtgggtcttaa

SEQ ID NO: 658 - DNA, 627 bp, Artificial Sequence
  synthetic construct; Sulfonylurea responsive repressor
atgggatctagattagataaaagtaaagygattaacagcgcattagagctgcttaatgaggtcggaatcgaaggtttaacaacccgtaaactcgcccagaagctaggtgtagagcagcctacattgtattggcatgtaaaaaataagcgagctctgctcgacgcaatggccattgagatgctggataggcacgcgactcacgtgtgccctttagaaggggaaagctggcaagattttttacgtaataacgctaaaagtatgagatgtgctttactaagtcatcgcgatggagcaaaagtatgtttaggtacaggctttacagaacagcaatatgaaggtgccgaaaatagtatggcctttttatgccaacaaggtttttcactagagcacgcaatgtatgcaatgcaggctgttggtatttatactttaggttgcgtattgttggatcaagagcttcaagtcgctaaagaagaaagggaaacacctactactgatagtatgccgccattagtccgacaagctctggaattaaaggatcaccaaggtgcagagccagccttcttattcggccttgaattgatcatatgcggattagaaaaacaacttaaatgtggaagtgggtcttaa

SEQ ID NO: 659 - DNA, 627 bp, Artificial Sequence
  synthetic construct; Sulfonylurea responsive repressor
atgggatctagattagataaaagtaaagtgattaacagcgcattagagctgcttaatgaggtcggaatcgaaggtttaacaacccgtaaactcgcccagaagctaggtgtagagcagcctacattgtattggcatgtaaaaaataagcgagctctgctcgacgcattggccattgagatgctggataggcacgcgactcacatctgccctttagaaggggaaagctggcaagattttttacgtaataacgctaaaagtatgagatgtgctttactaagtcatcgcgatggagcaaaagtatgtttaggtacaggctttacagaacagatgtatgaaactgccgaaaatagtatggcctttttatgccaacaaggtttttcactagagaacgcaatgtatgcaatgcaggctgctggtatttttactttaggttgcgtattgttggatcaagagcttcaagtcgctaaagaagaaagggaaacacctactactgatagtatgccgccattagtccgacaagttctggaattaaaggatcaccaaggtgcagagccagccttcttattcggccttgaattgatcatatgcggattagaaaaacaacttaaatgtgaaagtgggtcttaa

SEQ ID NO: 660 - DNA, 627 bp, Artificial Sequence
  synthetic construct; Sulfonylurea responsive repressor
atgggatctagattagataaaagtaaagygattaacagcgcattagagctgcttaatgaggtcggaatcgaaggtttaacaacccgtaaactcgcccagaagctaggtgtagagcagcctacattgtattggcatgtaaaaaataagcgagctctgctcgacgcattggccattgagatgctggataggcacgcgactcactattgccctttagaaggggaaagctggcaagattttttacgtaataacgctaaaagtatgagatgtgctttactaagtcatcgcgatggagcaaaagtatgtttaggtacaggctttacagaacagatgtatgaaagtgccgaaaatagtctggcctttttatgccaacaaggtttttcactagagcacgcaatgtatgcaatgcaggctgctggtatttttactttaggttgcgtattgttggatcaagagcttcaagtcgctaaagaagaaagggaaacacctactactgatagtatgccgccattagtccgacaagttctggaattaaaggatcaccaaggtgcagagccagccttcttattcggccttgaattgatcatatgcggattagaaaaacaacttaaatgtgaaagtgggtcttaa

SEQ ID NO: 661 - DNA, 627 bp, Artificial Sequence
  synthetic construct; Sulfonylurea responsive repressor
  misc_feature (595)..(595): n is a, c, g, or t
atgggatctagattagataaaagtaaagtgattaacagcgcattagagctgcttaatgaggtcggaatcgaaggtttaacaacccgtaaactcgcccagaagctaggtgtagagcagcctacattgtattggcatgtaaaaaataagcgagctctgctcgacgcaatggccattgagatgctggataggcacgcgactcactattgccctttagaaggggaaagctggcaagattttttacgtaataacgctaaaagtatgagatgtgctttactaagtcatcgcgatggagcaaaagtatgtttaggtacaggctttacagaacagcactatgaaagtgccgaaaatagtatggcctttttatgccaacaaggtttttcactagagcacgcaatgtatgcaatgcaggctgctggtatttatactttaggttgcgtattgttggatcaagagcttcaagtcgctaaagaagaaaggcaaacacctactactgatagtatgccgccattagtccgacaagctctggaattaaaggatcaccaaggtgcagagccagccttcttattcggccttgaattgatcatatgcggattanaaaaacaacttaaatgtgaaagtgggtcttaa

SEQ ID NO: 662 - DNA, 627 bp, Artificial Sequence
  synthetic construct; Sulfonylurea responsive repressor
atgggatctagattagataaaagtaaagygattaacagcgcattagagctgcttaatgaggtcggaatcgaaggtttaacaacccgtaaactcgcccagaagctaggtgtagagcagcctacattgtattggcatgtaaaaaataagcgagctctgctcgacgcaatggccattgagatgctggataggcacgcgactcacttgtgccctttagaaggggaaagctggcaagattttttacgtaataacgctaaaagtatgagatgtgctttactaagtcatcgcgatggagcaaaagtatgtttaggtacaggctttacagaacagcaatatgaaactgccgaaaatagtatggcctttttatgccaacaaggtttttcactagagcacgcaatgtatgcaatgcaggctgttggtatttatactttaggttgcgtattgttggatcaagagcttcaagtcgctaaagaagaaagggaaacacctactactgatagtatgccgccattactccgacaagctctggaattaaaggatcaccaaggtgcagagccagccttcttattcggccttgaattgatcatatgcggattagaaaaacaacttaaatgtgaaagtgggtcttaa

SEQ ID NO: 663 - DNA, 627 bp, Artificial Sequence
  synthetic construct; Sulfonylurea responsive repressor
  misc_feature (166)..(166): n is a, c, g, or t
  misc_feature (330)..(330): n is a, c, g, or t
atgggatctagattagataaaagtaaagtgattaacagcgcattagagctgcttaatgaggtcggaatcgaaggtttaacaacccgtaaactcgcccagaagctaggtgtagagcagcctacattgtattggcatgtaaaaaataagcgagctctgctcgacgcantggccattgagatgctggataggcacgcgactcactattgccctttagaaggggaaagctggcaagattttttacgtaataacgctaaaagtatgagatgtgctttactaagtcatcgcgatggagcaaaagtatgtttaggtacaggctttacagaacagcantatgaagctgccgaaaatagtatggcctttttatgccaacaaggtttttcactagagcacgcaatgtatgcaatgcaggctgctggtatttatactttaggttgcgtattgttggatcaagagcttcaagtcgctaaagaagaaagggaaacacctactactgatagtatgccgccattagtccgacaagttctggaattaaaggatcaccaaggtgcagagccagccttcttattcggccttgaattgatcatatgcggattagaaaaacaacttaaatgtgaaagtgggtcttaa

SEQ ID NO: 664 - DNA, 627 bp, Artificial Sequence
  synthetic construct; Sulfonylurea responsive repressor
  misc_feature (511)..(511): n is a, c, g, or t
atgggatctagattagataaaagtaaagtgattaacagcgcattagagctgcttaatgaggtcggaatcgaaggtttaacaacccgtaaactcgcccagaagctaggtgtagagcagcctacattgtattggcatgtaaaaaataagcgagctctgctcgacgcaatggccattgagatgctggataggcacgcgactcactattgccctttagaaggggaaagctggcaagattttttacgtaataacgctaaaagtatgagatgtgctttactaagtcatcgcgatggagcaaaagtatgtttaggtacaggctttacagaacagcaatatgaaactgccgaaaatagtatggcctttttatgccaacaaggtttttcactagagcacgcactgtatgcaatgcaggctgctggtatttatactttaggttgcgtattgttggatcaagagcttcaagtcgctaaagaagaaagggaaacacctactactgatagtatgccgccattantccgacaagttctggaattaaaggatcaccaaggtgcagagccagccttcttattcggccttgaattgatcatatgcggattagaaaaacaacttaaatgtgaaagtgggtcttaa

SEQ ID NO: 665 - DNA, 627 bp, Artificial Sequence
  synthetic construct; Sulfonylurea responsive repressor
atgggatctagattagataaaagtaaagygattaacagcgcattagagctgcttaatgaggtcggaatcgaaggtttaacaacccgtaaactcgcccagaagctaggtgtagagcagcctacattgtattggcatgtaaaaaataagcgagctctgctcgacgcaatggccattgagatgctggataggcacgcgactcactattgccctttagaaggggaaagctggcaagattttttacgtaataacgctaaaagtatgagatgtgctttactaagtcatcgcgatggagcaaaagtatgtttaggtacaggctttacagaacagcaatatgaaactgccgaaaatagtctggcctttttatgccaacaaggtttttcactagagcacgcaatgtatgcaatgcaggctgttggtatttttactttaggttgcgtattgttggatcaagagcttcaagtcgctaaagaagaaagggaaacacctactactgatagtatgccgccattagtccgacaagttctggaattaaaggatcaccaaggtgcagagccagccttcttattcggccttgaattgatcatatgcggattagaaaaacaacttaaatgtgaaagtgggtcttaa

SEQ ID NO: 666 - DNA, 627 bp, Artificial Sequence
  synthetic construct; Sulfonylurea responsive repressor
atgggatctagattagataaaagtaaagtgattaacagcgcattagagctgcttaatgaggtcggaatcgaaggtttaacaacccgtaaactcgcccagaagctaggtgtagagcagcctacattgtattggcatgtaaaaaataagcgagctctgctcgacgcaatggccattgagatgctggataggcacgcgactcactattgccctttagaaggagaaagctggcaagattttttacgtaataacgctaaaagtatgagatgtgctttactaagtcatcgcgatggagcaaaagtatgtttaggtacaggctttacagaacagcaatatgaaactgccgaaaatagtctggcctttttatgccaacaaggtttttcactagagaacgcactgtatgcaatgcaggctgttggtatttatactttaggttgcgtattgttggatcaagagcttcaagtcgctaaagaagaaagggaaacacctactactgatagtatgccgccattagtccgacaagctctggaattaaaggatcaccaaggtgcagagccagccttcttattcggccttgaattgatcatatgcggattagaaaaacaacttaaatgtgaaagtgggtcttaa

SEQ ID NO: 667 - DNA, 627 bp, Artificial Sequence
  synthetic construct; Sulfonylurea responsive repressor
atgggatctagattagataaaagtaaagtgattaacagcgcattagagctgcttaatgaggtcggaatcgaaggtttaacaacccgtaaactcgcccagaagctaggtgtagagcagcctacattgtattggcatgtaaaaaataagcgagctctgctcgacgcaatggccattgagatgctggataggcacgcgactcactattgccctttagaaggggaaagctggcaagattttttacgtaataacgctaaaagtatgagatgtgctttactaagtcatcgcgatggagcaaaagtatgtttaggtacaggctttacagaacagcactatgaaactgccgaaaatagtctggcctttttatgccaacaaggtttttcactagagcacgcaatgtatgcaatgcaggctgttggtatttatactttaggttgcgtattgttggatcaagagcttcaagtcgctaaagaagaaagggaaacacctactactgatagtatgccgccattagtccgacaagctctggaattaaaggatcaccaaggtgcagagccagccttcttattcggccttgaattgatcatatgcggattagaaaaacaacttaaatgtgaaagtgggtcttaa

SEQ ID NO: 668 - DNA, 627 bp, Artificial Sequence
  synthetic construct; Sulfonylurea responsive repressor
atgggatctagattagataaaagtaaagygattaacagcgcattagagctgcttaatgaggtcggaatcgaaggtttaacaacccgtaaactcgcccagaagctaggtgtagagcagcctacattgtattggcatgtaaaaaataagcgagctctgctcgacgcaatggccattgagatgctggataggcacgcgactcactattgccctttagaagaggaaagctggcaagattttttacgtaataacgctaaaagtatgagatgtgctttactaagtcatcgcgatggagcaaaagtatgtttaggtacaggctttacagaacagcaatatgaagctgccgaaaatagtatggcctttttatgccaacaaggtttttcactagagcacgcactgtatgcaatgcaggctgctggtatttatactttaggttgcgtattgttggatcaagagcttcaagtcgctaaagaagaaagggaaacacctactactgatagtatgccgccattagtccgacaagctctggaattaaaggatcaccaaggtgcagagccagccttcttattcggccttgaattgatcatatgcggattagaaaaacaacttaaatgtgaaagtgggtcttaa

SEQ ID NO: 669 - DNA, 627 bp, Artificial Sequence
  synthetic construct; Sulfonylurea responsive repressor
atgggatctagattagataaaagtaaagtgattaacagcgcattagagctgcttaatgaggtcggaatcgaaggtttaacaacccgtaaactcgcccagaagctaggtgtagagcagcctacattgtattggcatgtaaaaaataagcgagctctgctcgacgcaatggccattgagatgctggataggcacgcgactcactattgccctttagaaggggaaagctggcaagattttttacgtaataacgctaaaagtatgagatgtgctttactaagtcatcgcgatggagcaaaagtatgtttaggtacaggctttacagaacagcaatatgaaactgccgaaaatagtctggcctttttatgccaacaaggtttttcactagagaacgcaatgtatgcaatgcaggctgctggtatttatactttaggttgcgtattgttggatcaagagcttcaagtcgctaaagaagaaagggaaacacctactactgatagtatgccgccattagtccgacaaggtctggaattaaaggatcaccaaggtgcagagccagccttcttattcggtcttgaattgatcatatgcggattagaaaaacaacttaaatgtgaaagtgggtcttaa

SEQ ID NO: 670 - DNA, 627 bp, Artificial Sequence
  synthetic construct; Sulfonylurea responsive repressor
atgggatctagattagataaaagtaaagcgattaacagcgcattagagctgcttaatgaggtcggaatcgaaggtttaacaacccgtaaactcgcccagaagctaggtgtagagcagcctacattgtattggcatgtaaaaaataagcgagctctgctcgacgcattggccattgagatgctggataggcacgcgactcactattgccctttagaaggggaaagctggcaagattttttacgtaataacgctaaaagtatgagatgtgctttactaagtcatcgcgatggagcaaaagtatgtttaggtacaggctttacagaacagcactatgaaactgccgaaaatagtctggcctttttatgccaacaaggtttttcactagagaacgcaatgtatgcaatgcaggctgttggtatttttactttaggttgcgtattgttggatcaagagcttcaagtcgctaaagaagaaagggaaacacctactactgatagtatgccgccattagtccgacaagttctggaattaaaggatcaccaaggtgcagagccagccttcttattcggccttgaattgatcatatgcggattagaaaaacaacttaaatgtgaaagtgggtcttaa

SEQ ID NO: 671 - DNA, 627 bp, Artificial Sequence
  synthetic construct; Sulfonylurea responsive repressor
atgggatctagattagataaaagtaaagtgattaacagcgcattagagctgcttaatgaggtcggaatcgaaggtttaacaacccgtaaactcgcccagaagctaggtgtagagcagcctacattgtattggcatgtaaaaaataagcgagctctgctcgacgcaatggccattgagatgctggataggcacgcgactcactattgccctttagaaggggaaagctggcaagattttttacgtaataacgctaaaagtatgagatgtgctttactaagtcatcgcgatggagcaaaagtatgtttaggtacaggctttacagaacagcaatatgaaagtgccgaaaatagtctggcctttttatgccaacaaggtttttcactagagaacgcaatgtatgcaatgcaggctgctggtatttatactttaggttgcgtattgttggatcaagagcttcaagtcgctaaagaagaaagggaaacacctactactgatagtatgccgccattactccgacaagctctggaattaaaggatcaccaaggtgcagagccagccttcttattcggccttgaattgatcatatgcggattagaaaaacaacttaaatgtgaaagtgggtcttaa

SEQ ID NO: 672 - DNA, 627 bp, Artificial Sequence
  synthetic construct; Sulfonylurea responsive repressor
atgggatctagattagataaaagtaaagygattaacagcgcattagagctgcttaatgaggtcggaatcgaaggtttaacaacccgtaaactcgcccagaagctaggtgtagagcagcctacattgtattggcatgtaaaaaataagcgagctctgctcgacgcaatggccattgagatgctggataggcacgcgactcactattgccctttagaaggggaaagctggcaagattttttacgtaataacgctaaaagtatgagatgtgctttactaagtcaacgcgatggagcaaaagtatgtttaggtacaggctttacagaacagcaatatgaaggtgccgaaaatagtctggcctttttatgccaacaaggtttttcactagagcacgcactgtatgcaatgcaggctgctggtatttttactttaggttgcgtattgttggatcaagagcttcaagtcgctaaagaagaaagggaaacacctactactgatagtatgccgccattagtccgacaagctctggaattaaaggatcaccaaggtgcagagccagccttcttattcggccttgaattgatcatatgcggattagaaaaacaacttaaatgtgaaagtgggtcttaa

SEQ ID NO: 673 - DNA, 627 bp, Artificial Sequence
  synthetic construct; Sulfonylurea responsive repressor
atgggatctagattagataaaagtaaagtgattaacagcgcattagagctgcttaatgaggtcggaatcgaaggtttaacaacccgtaaactcgcccagaagctaggtgtagagcagcctacattgtattggcatgtaaaaaataagcgagctctgctcgacgcaatggccattgagatgctggataggcacgcgactcactattgccctttagaaggggaaagctggcaagattttttacgtaataacgctaaaagtatgagatgtgctttactaagtcatcgcgatggagcaaaagtatgtttaggtacaggctttacagaacagcaatatgaaactgccgaaaatagtatggcctttttatgccaacaaggtttttcactagagaacgcactgtatgcaatgcaggctgctggtatttatactttaggttgcgtattgttggatcaagagcttcaagtcgctaaagaagaaagggaaacacctactactgatagtatgccgccattagtccgacaaggtctggaattaaaggatcaccaaggtgcagagccagccttcttattcggccttgaattgatcatatgcggattagaaaaacaacttaaatgtgaaagtgggtcttaa

SEQ ID NO: 674 - DNA, 627 bp, Artificial Sequence
  synthetic construct; Sulfonylurea responsive repressor
atgggatctagattagataaaagtaaagtgattaacagcgcattagagctgcttaatgaggtcggaatcgaaggtttaacaacccgtaaactcgcccagaagctaggtgtagagcagcctacattgtattggcatgtaaaaaataagcgagctctgctcgacgcattggccattgagatgctggataggcacgcgactcactattgccctttagaaggggaaagctggcaagattttttacgtaataacgctaaaagtatgagatgtgctttactaagtcatcgcgatggagcaaaagtatgtttaggtacaggctttacagaacagatgtatgaaagtgccgaaaatagtatggcctttttatgccaacaaggtttttcactagagaacgcaatgtatgcaatgcaggctgctggtatttatactttaggttgcgtattgttggatcaagagcttcaagtcgctaaagaagaaagggaaacacctactactgatagtatgccgccattagtccgacaaggtctggaattaaaggatcaccaaggtgcagagccagccttcttattcggccttgaattgatcatatgcggattagaaaaacaacttaaatgtgaaagtgggtcttaa

SEQ ID NO: 675 - DNA, 627 bp, Artificial Sequence
  synthetic construct; Sulfonylurea responsive repressor
atgggatctagattagataaaagtaaagtgattaacagcgcattagagctgcttaatgaggtcggaatcgaaggtttaacaacccgtaaactcgcccagaagctaggtgtagagcagcctacattgtattggcatgtaaaaaataagcgagctctgctcgacgcaatggccattgagatgctggataggcacgcgactcactattgccctttagaaggggaaagctggcaagattttttacgtaataacgctaaaagtatgagatgtgctttactaagtcatcgcgatggagcaaaagtatgtttaggtacaggctttacagaacagcaatatgaaggtgccgaaaatagtatggcctttttatgccaacaaggtttttcactagagaacgcaatgtatgcaatgcaggctgttggtatttttactttaggttgcgtattgttggatcaagagcttcaagtcgctaaagaagaaagggaaacacctactactgatagtatgccgccattagtccgacaagctctggaattaaaggatcaccaaggtgcagagccagccttcttattcggccttgaattgatcatatgcggattagaaaaacaacttaaatgtgaaagtgggtcttaa

SEQ ID NO: 676 - DNA, 627 bp, Artificial Sequence
  synthetic construct; Sulfonylurea responsive repressor
  misc_feature (203)..(204): n is a, c, g, or t
  misc_feature (330)..(330): n is a, c, g, or t
  misc_feature (337)..(338): n is a, c, g, or t
  misc_feature (394)..(394): n is a, c, g, or t
atgggatctagattagataaaagtaaagtgattaacagcgcattagagctgcttaatgaggtcggaatcgaaggtttaacaacccgtaaactcgcccagaagctaggtgtagagcagcctacattgtattggcatgtaaaaaataagcgagctctgctcgacgcattggccattgagatgctggataggcacgcgactcactnntgccctttagaaggggaaagctggcaagattttttacgtaataacgctaaaagtatgagatgtgctttactaagtcatcgcgatggagcaaaagtatgtttaggtacaggctttacagaacagcantatgaanntgccgaaaatagtatggcctttttatgccaacaaggtttttcactagagcacgcantgtatgcaatgcaggctgctggtatttttactttaggttgcgtattgttggatcaagagcttcaagtcgctaaagaagaaagggaaacacctactactgatagtatgccgccattactccgacaagctctggaattaaaggatcaccaaggtgcagagccagccttcttattcggccttgaattgatcatatgcggattagaaaaacaacttaaatgtgaaagtgggtcttaa

SEQ ID NO: 677 - DNA, 627 bp, Artificial Sequence
  synthetic construct; Sulfonylurea responsive repressor
atgggatctagattagataaaagtaaagtgattaacagcgcattagagctgcttaatgaggtcggaatcgaaggtttaacaacccgtaaactcgcccagaagctaggtgtagagcagcctacattgtattggcatgtaaaaaataagcgagctctgctcgacgcaatggccattgagatgctggataggcacgcgactcacatctgccctttagaaggggaaagctggcaagattttttacgtaataacgctaaaagtatgagatgtgctttactaagtcatcgcgatggagcaaaagtatgtttaggtacaggctttacagaacagcaatatgaaactgccgaaaatagtctggcctttttatgccaacaaggtttttcactagagaacgcactgtatgcaatgcaggctgctggtatttttactttaggttgcgtattgttggatcaagagcttcaagtcgctaaagaagaaagggaaacacctactactgatagtatgccgccattagtccgacaagttctggaattaaaggatcaccaaggtgcagagccagccttcttattcggccttgaattgatcatatgcggattagaaaaacaacttaaatgtgaaagtgggtcttaa

SEQ ID NO: 678 - DNA, 627 bp, Artificial Sequence
  synthetic construct; Sulfonylurea responsive repressor
  misc_feature (203)..(204): n is a, c, g, or t
  misc_feature (337)..(337): n is a, c, g, or t
  misc_feature (388)..(388): n is a, c, g, or t
  misc_feature (415)..(415): n is a, c, g, or t
  misc_feature (512)..(512): n is a, c, g, or t
  misc_feature (521)..(521): n is a, c, g, or t
atgggatctagattagataaaagtaaagtgattaacagcgcattagagctgcttaatgaggtcggaatcgaaggtttaacaacccgtaaactcgcccagaagctaggtgtagagcagcctacattgtattggcatgtaaaaaataagcgagctctgctcgacgcattggccattgagatgctggataggcacgcgactcactnntgccctttagaaggggaaagctggcaagattttttacgtaataacgctaaaagtatgagatgtgctttactaagtcatcgcgatggagcaaaagtatgtttaggtacaggctttacagaacagctgtatgaanctgccgaaaatagtctggcctttttatgccaacaaggtttttcactagagnacgcactgtatgcaatgcaggctgctngtatttatactttaggttgcgtattgttggatcaagagcttcaagtcgctaaagaagaaagggaaacacctactactgatagtatgccgccattagnccgacaagntctggaattaaaggatcaccaaggtgcagagccagccttcttattcggccttgaattgatcatatgcggattagaaaaacaacttaaatgtgaaagtgggtcttaa

SEQ ID NO: 679 - DNA, 627 bp, Artificial Sequence
  synthetic construct; Sulfonylurea responsive repressor
atgggatctagattagataaaagtaaagtgattaacagcgcattagagctgcttaatgaggtcggaatcgaaggtttaacaacccgtaaactcgcccagaagctaggtgtagagcagcctacattgtattggcatgtaaaaaataagcgagctctgctcgacgcattggccattgagatgctggataggcacgcgactcactattgccctttagaaggggaaagctggcaagattttttacgtaataacgctaaaagtatgagatgtgctttactaagtcatcgcgatggagcaaaagtatgtttaggtacaggctttacagaaaagcaatatgaaagtgccgaaaatagtctggcctttttatgccaacaaggtttttcactagagcacgcaatgtatgcaatgcaggctgctggtatttatactttaggttgcgtattgttggatcaagagcttcaagtcgctaaagaagaaagggaaacacctactactgatagtatgccgccattagtccgacaagctctggaattaaaggatcaccaaggtgcagagccagccttcttattcggccttgaattgatcatatgcggattagaaaaacaacttaaatgtgaaagtgggtcttaa

SEQ ID NO: 680 - DNA, 627 bp, Artificial Sequence
  synthetic construct; Sulfonylurea responsive repressor
  misc_feature (511)..(511): n is a, c, g, or t
atgggatctagattagataaaagtaaagtgattaacagcgcattagagctgcttaatgaggtcggaatcgaaggtttaacaacccgtaaactcgcccagaagctaggtgtagagcagcctacattgtattggcatgtaaaaaataagcgagctctgctcgacgcaatggccattgagatgctggataggcacgcgactcactattgccctttagaaggggaaagctggcaagattttttacgtaataacgctaaaagtatgagatgtgctttactaagtcatcgcgatggagcaaaagtatgtttaggtacaggctttacagaacagcaatatgaaagtgccgaaaatagtatggcctttttatgccaacaaggtttttcactagagcacgcaatgtatgcaatgcaggctgctggtatttatactttaggttgcgtattgttggatcaagagcttcaagtcgctaaagaagaaagggaaacacctactactgatagtatgccgccattantccgacaagttctggaattaaaggatcaccaaggtgcagagccagccttcttattcggccttgaattgatcatatgcggattagaaaaacaacttaaatgtgaaagtgggtcttaa

SEQ ID NO: 681 - DNA, 627 bp, Artificial Sequence
  synthetic construct; Sulfonylurea responsive repressor
  misc_feature (166)..(166): n is a, c, g, or t
  misc_feature (352)..(352): n is a, c, g, or t
  misc_feature (415)..(415): n is a, c, g, or t
atgggatctagattagataaaagtaaagtgattaacagcgcattagagctgcttaatgaggtcggaatcgaaggtttaacaacccgtaaactcgcccagaagctaggtgtagagcagcctacattgtattggcatgtaaaaaataagcgagctctgctcgacgcantggccattgagatgctggataggcacgcgactcactattgccctttagaaggggaaagctggcaagattttttacgtaataacgctaaaagtatgagatgtgctttactaagtcatcgcgatggagcaaaagtatgtttaggtacaggctttacagaacagatgtatgaaactgccgaaaatagtntggcctttttatgccaacaaggtttttcactagagcacgcaatgtatgcaatgcaggctgctngtatttatactttaggttgcgtattgttggatcaagagcttcaagtcgctaaagaagaaagggaaacacctactactgatagtatgccgccattagctcgacaaggtctggaattaaaggatcaccaaggtgcagagccagccttcttattcggccttgaattgatcatatgcggattagaaaaacaacttaaatgtgaaagtgggtcttaa

SEQ ID NO: 682 - DNA, 627 bp, Artificial Sequence
  synthetic construct; Sulfonylurea responsive repressor
  misc_feature (330)..(330): n is a, c, g, or t
atgggatctagattagataaaagtaaagtgattaacagcgcattagagctgcttaatgaggtcggaatcgaaggtttaacaacccgtaaactcgcccagaagctaggtgtagagcagcctacattgtattggcatgtaaaaaataagcgagctctgctcgacgcaatggccattgagatgctggataggcacgcgactcactattgccctttagaaggggaaagctggcaagattttttacgtaataacgctaaaagtatgagatgtgctttactaagtcatcgcgatggagcaaaagtatgtttaggtacaggctttacagaacagcantatgaagctgccgaaaatagtatggcctttttatgccaacaaggtttttcactagagcacgcaatgtatgcaatgcaagctgctggtatttttactttaggttgcgtattgttggatcaagagcttcaagtcgctaaagaagaaagggaaacacctactactgatagtatgccgccattagtccgacaagctctggaattaaaggatcaccaaggtgcagagccagccttcttattcggccttgaattgatcatatgcggattagaaaaacaacttaaatgtgaaagtgggtcttaa

SEQ ID NO: 683 - DNA, 627 bp, Artificial Sequence
  synthetic construct; Sulfonylurea responsive repressor
  misc_feature (204)..(204): n is a, c, g, or t
atgggatctagattagataaaagtaaagtgattaacagcgcattagagctgcttaatgaggtcggaatcgaaggtttaacaacccgtaaactcgcccagaagctaggtgtagagcagcctacattgtattggcatgtaaaaaataagcgagctctgctcgacgcaatggccattgagatgctggataggcacgcgactcacatntgccctttagaaggggaaagctggcaagattttttacgtaataacgctaaaagtatgagatgtgctttactaagtcatcgcgatggagcaaaagtatgtttaggtacaggctttacagaacagcaatatgaaggtgccgaaaatagtctggcctttttatgccaacaaggtttttcactagagcacgcaatgtatgcaatgcaggctgttggtatttatactttaggttgcgtattgttggatcaagagcttcaagtcgctaaagaagaaagggaaacacctactactgatagtatgccgccattagtccgacaaggtctggaattaaaggatcaccaaggtgcagagccagccttcttattcggccttgaattgatcatatgcggattagaaaaacaacttaaatgtgaaagtgggtcttaa

SEQ ID NO: 684 - DNA, 627 bp, Artificial Sequence
  synthetic construct; Sulfonylurea responsive repressor
  misc_feature (330)..(330): n is a, c, g, or t
  misc_feature (337)..(337): n is a, c, g, or t
  misc_feature (422)..(422): n is a, c, g, or t
  misc_feature (595)..(595): n is a, c, g, or t
atgggatctagattagataaaagtaaagtgattaacagcgcattagagctgcttaatgaggtcggaatcgaaggtttaacaacccgtaaactcgcccagaagctaggtgtagagcagcctacattgtattggcatgtaaaaaataagcgagctctgctcgacgcaatggccattgagatgctggataggcacgcgactcactattgccctttagaaggggaaagctggcaagattttttacgtaataacgctaaaagtatgagatgtgctttactaagtcatcgcgatggagcaaaagtatgtttaggtacaggctttacagaacagcantatgaanctgccgaaaatagtctggcctttttatgccaacaaggtttttcactagagcacgcaatgtatgcaatgcaggctgctggtatttntactttaggttgcgtattgttggatcaagagcttcaagtcgctaaagaagaaagggaaacacctactactgatagtatgccgccattagctcgacaaggtctggaattaaaggatcaccaaggtgcagagccagccttcttattcggccttgaattgatcatatgcggattanaaaaacaacttaaatgtgaaagtgggtcttaa

SEQ ID NO: 685 - DNA, 627 bp, Artificial Sequence
  synthetic construct; Sulfonylurea responsive repressor
  misc_feature (461)..(461): n is a, c, g, or t
  misc_feature (583)..(583): n is a, c, g, or t
  misc_feature (595)..(595): n is a, c, g, or t
atgggatctagattagataaaagtaaagtgattaacagcgcattagagctgcttaatgaggtcggaatcgaaggtttaacaacccgtaaactcgcccagaagctaggtgtagagcagcctacattgtattggcatgtaaaaaataagcgagctctgctcgacgcaatggccattgagatgctggataggcacgcgactcactattgccctttagaaggggaaagctggcaagattttttacgtaataacgctaaaagtatgagatgtgctttactaagtcatcgcgatggagcaaaagtatgtttaggtacaggctttacagaacagcaatatgaaagtgccgaaaatagtatggcctttttatgccaacaaggtttttcactagagcacgcaatgtatgcaatgcaggctgctggtatttatactttaggttgcgtattgttggatcaagagcttcaagncgctaaagaagaaagggaaacacctactactgatagtatgccgccattactccgacaagttctggaattaaatgatcaccaaggtgcagagccagccttcttattcggccttgaattgatcntatgcggattanaaaaacaacttaaatgtgaaagtgggtcttaa

SEQ ID NO: 686 - DNA, 627 bp, Artificial Sequence
  synthetic construct; Sulfonylurea responsive repressor
  misc_feature (279)..(279): n is a, c, g, or t
  misc_feature (417)..(417): n is a, c, g, or t
  misc_feature (461)..(461): n is a, c, g, or t
  misc_feature (481)..(481): n is a, c, g, or t
  misc_feature (498)..(498): n is a, c, g, or t
  misc_feature (518)..(518): n is a, c, g, or t
  misc_feature (522)..(522): n is a, c, g, or t
  misc_feature (556)..(556): n is a, c, g, or t
  misc_feature (583)..(583): n is a, c, g, or t
  misc_feature (600)..(600): n is a, c, g, or t
  misc_feature (603)..(603): n is a, c, g, or t
atgggatctagattagataaaagtaaagtgattaacagcgcattagagctgcttaatgaggtcggaatcgaaggtttaacaacccgtaaactcgcccagaagctaggtgtagagcagcctacattgtattggcatgtaaaaaataagcgagctctgctcgacgcaatggccattgagatgctggataggcacgcgactcactattgccctttagaaggggaaagctggcaagattttttacgtaataacgctaaaagtatgagatgtgctttactaagncatcgcgatggagcaaaagtatgtttaggtacaggctttacagaacagcaatatgaaggtgccgaaaatagtctggcctttttatgccaacaaggtttttcactagagcacgcaatgtatgcaatgcaggctgctggnatttatactttaggttgcgtattgttggatcaagagcttcaagncgctaaagaagaaagggaancccctactactgatagnatgccgccattagctcgacnaggnctggaattaaaggatcaccaaggtccagagccanccttcttattcggccttgaattgatcntatgcggattagaaaancancttaaatgtgaaagtgggtcttaa

SEQ ID NO: 687 - DNA, 627 bp, Artificial Sequence
  synthetic construct; Sulfonylurea responsive repressor
atgggatctagattagataaaagtaaagtgattaacagcgcattagagctgcttaatgaggtcggaatcgaaggtttaacaacccgtaaactcgcccagaagctaggtgtagagcagcctacattgtattggcatgtaaaaaataagcgagctctgctcgacgcaatggccattgagatgctggataggcacgcgactcacgtgtgccctttagaaggggaaagctggcaagattttttacgtaataacgctaaaagtatgagatgtgctttactaagtcatcgcgatggagcaaaagtatgtttaggtacaggctttacagaacagcaatatgaaggtgccgaaaatagtatggcctttttatgccaacaaggtttttcactagagcacgcaatgtatgcaatgcaggctgttggtatttatactttaggttgcgtattgttggatcaagagcttcaagtcgctaaagaagaaagggaaacacctactactgatagtatgccgccattagtccgacaagctctggaattaaaggatcaccaaggtgcagagccagccttcttattcggccttgaattgatcatatgcggattagaaaaacaacttaaatgtggaagtgggtcttaa

SEQ ID NO: 688 - DNA, 627 bp, Artificial Sequence
  synthetic construct; Sulfonylurea responsive repressor
  misc_feature (166)..(166): n is a, c, g, or t
  misc_feature (203)..(203): n is a, c, g, or t
  misc_feature (325)..(325): n is a, c, g, or t
  misc_feature (328)..(330): n is a, c, g, or t
  misc_feature (352)..(352): n is a, c, g, or t
  misc_feature (388)..(388): n is a, c, g, or t
  misc_feature (415)..(415): n is a, c, g, or t
  misc_feature (422)..(422): n is a, c, g, or t
  misc_feature (513)..(513): n is a, c, g, or t
atgggatctagattagataaaagtaaagtgattaacagcgcattagagctgcttaatgaggtcggaatcgaaggtttaacaacccgtaaactcgcccagaagctaggtgtagagcagcctacattgtattggcatgtaaaaaataagcgagctctgctcgacgcantggccattgagatgctggataggcacgcgactcactngtgccctttagaaggggaaagctggcaagattttttacgtaataacgctaaaagtatgagatgtgctttactaagtcatcgcgatggagcaaaagtatgtttaggtacaggctttacagaanagnnntatgaaggtgccgaaaatagtntggcctttttatgccaacaaggtttttcactagagnacgcaatgtatgcaatgcaggctgctngtatttntactttaggttgcgtattgttggatcaagagcttcaagtcgctaaagaagaaagggaaacacctactactgatagtatgccgccattagcncgacaagttctggaattaaaggatcaccaaggtgcagagccagccttcttattcggccttgaattgatcatatgcggattagaaaaacaacttaaatgtgaaagtgggtcttaa

SEQ ID NO: 689 - DNA, 627 bp, Artificial Sequence
  synthetic construct; Sulfonylurea responsive repressor
  misc_feature (325)..(325): n is a, c, g, or t
  misc_feature (328)..(328): n is a, c, g, or t
  misc_feature (394)..(394): n is a, c, g, or t
  misc_feature (413)..(413): n is a, c, g, or t
  misc_feature (512)..(512): n is a, c, g, or t
atgggatctagattagataaaagtaaagtgattaacagcgcattagagctgcttaatgaggtcggaatcgaaggtttaacaacccgtaaactcgcccagaagctaggtgtagagcagcctacattgtattggcatgtaaaaaataagcgagctctgctcgacgcaatggccattgagatgctggataggcacgcgactcactattgccctttagaaggggaaagctggcaagattttttacgtaataacgctaaaagtatgagatgtgctttactaagtcatcgcgatggagcaaaagtatgtttaggtacaggctttacagaanagntgtatgaaagtgccgaaaatagtatggcctttttatgccaacaaggtttttcactagagcacgcantgtatgcaatgcaggctgntggtatttatactttaggttgcgtattgttggatcaagagcttcaagtcgctaaagaagaaagggaaacacctactactgatagtatgccgccattagntcgacaagctctggaattaaaggatcaccaaggtgcagagccagccttcttattcggccttgaattgatcatatgcggattagaaaaacaacttaaatgtgaaagtgggtcttaa

SEQ ID NO: 690 - DNA, 627 bp, Artificial Sequence
  synthetic construct; Sulfonylurea responsive repressor
atgggatctagattagataaaagtaaagtgattaacagcgcattagagctgcttaatgaggtcggaatcgaaggtttaacaacccgtaaactcgcccagaagctaggtgtagagcagcctacattgtattggcatgtaaaaaataagcgagctctgctcgacgcattggccattgagatgctggataggcacgcgactcactattgccctttagaaggggaaagctggcaagattttttacgtaataacgctaaaagtatgagatgtgctttactaagtcatcgcgatggagcaaaagtatgtttaggtacaggctttacagaaaagcaatatgaaactgccgaaaatagtatggcctttttatgccaacaaggtttttcactagagaacgcactgtatgcaatgcaggctgttggtatttatactttaggttgcgtattgttggatcaagagcttcaagtcgctaaagaagaaagggaaacacctactactgatagtatgccgccattagtccgacaagctctggaattaaaggatcaccaaggtgcagagccagccttcttattcggccttgaattgatcatatgcggattagaaaaacaacttaaatgtgaaagtgggtcttaa

SEQ ID NO: 691 - DNA, 627 bp, Artificial Sequence
  synthetic construct; Sulfonylurea responsive repressor
atgggatctagattagataaaagtaaagtgattaacagcgcattagagctgcttaatgaggtcggaatcgaaggtttaacaacccgtaaactcgcccagaagctaggtgtagagcagcctacattgtattggcatgtaaaaaataagcgagctctgctcgacgcattggccattgagatgctggataggcacgcgactcactattgccctttagaaggggaaagctggcaagattttttacgtaataacgctaaaagtatgagatgtgctttactaagtcatcgcgatggagcaaaagtatgtttaggtacaggctttacagaacagatgtatgaaactgccgaaaatagtctggcctttttatgccaacaaggtttttcactagagcacgcaatgtatgcaatgcaggctgctggtatttttactttaggttgcgtattgttggatcaagagcttcaagtcgctaaagaagaaagggaaacacctactactgatagtatgccgccattagtccgacaagttctggaattaaaggatcaccaaggtgcagagccagccttcttattcggccttgaattgatcatatgcggattagaaaaacaacttaaatgtgaaagtgggtcttaa

SEQ ID NO: 692 - DNA, 627 bp, Artificial Sequence
  synthetic construct; Sulfonylurea responsive repressor
  misc_feature (325)..(325): n is a, c, g, or t
atgggatctagattagataaaagtaaagtgattaacagcgcattagagctgcttaatgaggtcggaatcgaaggtttaacaacccgtaaactcgcccagaagctaggtgtagagcagcctacattgtattggcatgtaaaaaataagcgagctctgctcgacgcaatggccattgagatgctggataggcacgcgactcactattgccctttagaaggggaaagctggcaagattttttacgtaataacgctaaaagtatgagatgtgctttactaagtcatcgcgatggagcaaaagtatgtttaggtacaggctttacagaanagctgtatgaaagtgccgaaaatagtctggcctttttatgccaacaaggtttttcactagagcacgcaatgtatgcaatgcaggctgttggtatttatactttaggttgcgtattgttggatcaagagcttcaagtcgctaaagaagaaagggaaacacctactactgatagtatgccgccattagtccgacaagttctggaattaaaggatcaccaaggtgcagagccagccttcttattcggccttgaattgatcatatgcggattagaaaaacaacttaaatgtgaaagtgggtcttaa

SEQ ID NO: 693 - DNA, 627 bp, Artificial Sequence
  synthetic construct; Sulfonylurea responsive repressor
atgggatctagattagataaaagtaaagtgattaacagcgcattagagctgcttaatgaggtcggaatcgaaggtttaacaacccgtaaactcgcccagaagctaggtgtagagcagcctacattgtattggcatgtaaaaaataagcgagctctgctcgacgcattggccattgagatgctggataggcacgcgactcactattgccctttagaaggggaaagctggcaagattttttacgtaataacgctaaaagtatgagatgtgctttactaagtcatcgcgatggagcaaaagtatgtttaggtacaggctttacagaacagatgtatgaaactgccgaaaatagtatggcctttttatgccaacaaggtttttcactagagcacgcactgtatgcaatgcaggctgctggtatttttactttaggttgcgtattgttggatcaagagcttcaagtcgctaaagaagaaagggaaacacctactactgatagtatgccgccattagtccgacaagctctggaattaaaggatcaccaaggtgcagagccagccttcttattcggccttgaattgatcatatgcggattagaaaaacaacttaaatgtgaaagtgggtcttaa

SEQ ID NO: 694 - DNA, 627 bp, Artificial Sequence
  synthetic construct; Sulfonylurea responsive repressor
atgggatctagattagataaaagtaaagtgattaacagcgcattagagctgcttaatgaggtcggaatcgaaggtttaacaacccgtaaactcgcccagaagctaggtgtagagcagcctacattgtattggcatgtaaaaaataagcgagctctgctcgacgcaatggccattgagatgctggataggcacgcgactcactattgccctttagaaggggaaagctggcaagattttttacgtaataacgctaaaagtatgagatgtgctttactaagtcatcgcgatggagcaaaagtatgtttaggtacaggctttacagaacagatgtatgaaagtgccgaaaatagtctggcctttttatgccaacaaggtttttcactagagaacgcactgtatgcaatgcaggctgttggtatttatactttaggttgcgtattgttggatcaagagcttcaagtcgctaaagaagaaagggaaacacctactactgatagtatgccgccattagtccgacaagttctggaattaaaggatcaccaaggtgcagagccagccttcttattcggccttgaattgatcatatgcggattagaaaaacaacttaaatgtgaaagtgggtcttaa

SEQ ID NO: 695 - DNA, 627 bp, Artificial Sequence
  synthetic construct; Sulfonylurea responsive repressor
atgggatctagattagataaaagtaaagtgattaacagcgcattagagctgcttaatgaggtcggaatcgaaggtttaacaacccgtaaactcgcccagaagctaggtgtagagcagcctacattgtattggcatgtaaaaaataagcgagctctgctcgacgcaatggccattgagatgctggataggcacgcgactcacttctgccctttagaaggggaaagctggcaagattttttacgtaataacgctaaaagtatgagatgtactttactaagtcatcgcgatggagcaaaagtatgtttaggtacaggctttacagaacagcaatatgaaagtgccgaaaatagtctggcctttttatgccaacaaggtttttcactagagaacgcaatgtatgcaatgcaggctgttggtatttatactttaggttgcgtattgttggatcaagagcttcaagtcgctaaagaagaaagggaaacacctactactgatagtatgccgccattagtccgacaagctctggaattaaaggatcaccaaggtgcagagccagccttcttattcggccttgaattgatcatatgcggattagaaaaacaacttaaatgtgaaagtgggtcttaa

SEQ ID NO: 696 - DNA, 627 bp, Artificial Sequence
  synthetic construct; Sulfonylurea responsive repressor
atgggatctagattagataaaagtaaagtgattaacagcgcattagagctgcttaatgaggtcggaatcgaaggtttaacaacccgtaaactcgcccagaagctaggtgtagagcagcctacattgtattggcatgtaaaaaataagcgagctctgctcgacgcattggccattgagatgctggataggcacgcgactcacatctgccctttagaaggggaaagctggcaagattttttacgtaataacgctaaaagtatgagatgtgctttactaagtcatcgcgatggagcaaaagtatgtttaggtacaggctttacagaacagatgtatgaagctgccgaaaatagtatggcctttttatgccaacaaggtttttcactagagaacgcaatgtatgcaatgcaggctgctggtatttatactttaggttgcgtattgttggatcaagagcttcaagtcgctaaagaagaaagggaaacacctactactgatagtatgccgccattagtccgacaagctctggaattaaaggatcaccaaggtgcagagccagccttcttattcggccttgaattgatcatatgcggattagaaaaacaacttaaatgtgaaagtgggtcttaa

SEQ ID NO: 697 - DNA, 627 bp, Artificial Sequence
  synthetic construct; Sulfonylurea responsive repressor
atgggatctagattagataaaagtaaagtgattaacagcgcattagagctgcttaatgaggtcggaatcgaaggtttaacaacccgtaaactcgcccagaagctaggtgtagagcagcctacattgtattggcatgtaaaaaataagcgagctctgctcgacgcaatggccattgagatgctggataggcacgcgactcactattgccctttagaaggggaaagctggcaagattttttacgtaataacgctaaaagtatgagatgtgctttactaagtcatcgcgatggagcaaaagtatgtttaggtacaggctttacagaacagcactatgaaactgccgaaaatagtctggcctttttatgccaacaaggtttttcactagagaacgcaatgtatgcaatgcaggctgctggtatttatactttaggttgcgtattgttggatcaagagcttcaagtcgctaaagaagaaagggaaacacctactactgatagtatgccgccattagtccgacaagttctggaattaaaggatcaccaaggtgcagagccagccttcttattcggccttgaattgatcatatgcggattagaaaaacaacttaaatgtgaaagtgggtcttaa

SEQ ID NO: 698 - DNA, 627 bp, Artificial Sequence
  synthetic construct; Sulfonylurea responsive repressor
atgggatctagattagataaaagtaaagtgattaacagcgcattagagctgcttaatgaggtcggaatcgaaggtttaacaacccgtaaactcgcccagaagctaggtgtagagcagcctacattgtattggcatgtaaaaaataagcgagctctgctcgacgcaatggccattgagatgctggataggcacgcgactcacttgtgccctttagaaggggaaagctggcaagattttttacgtaataacgctaaaagtatgagatgtgctttactaagtcatcgcgatggagcaaaagtatgtttaggtacaggctttacagaacagcaatatgaaactgccgaaaatagtatggcctttttatgccaacaaggtttttcactagagcacgcaatgtatgcaatgcaggctgctggtatttatactttaggttgcgtattgttggatcaagagcttcaagtcgctaaagaagaaagggaaacacctactactgatagtatgccgccattagtccgacaaggtctggaattaaaggatcaccaaggtgcagagccagccttcttattcggccttgaattgatcatatgcggattagaaaaacaacttaaatgtgaaagtgggtcttaa

SEQ ID NO: 699 - DNA, 627 bp, Artificial Sequence
  synthetic construct; Sulfonylurea responsive repressor
atgggatctagattagataaaagtaaagtgattaacagcgcattagagctgcttaatgaggtcggaatcgaaggtttaacaacccgtaaactcgcccagaagctaggtgtagagcagcctacattgtattggcatgtaaaaaataagcgagctctgctcgacgcattggccattgagatgctggataggcacgcgactcacttctgccctttagaaggggaaagctggcaagattttttacgtaataacgctaaaagtatgagatgtgctttactaagtcatcgcgatggagcaaaagtatgtttaggtacaggctttacagaacagatgtatgaagctgccgaaaatagtatggcctttttatgccaacaaggtttttcactagagcacgcaatgtatgcaatgcaggctgtttgtatttatactttaggttgcgtattgttggatcaagagcttcaagtcgctaaagaagaaagggaaacacctactactgatagtatgccgccattagctcgacaaggtctggaattaaaggatcaccaaggtgcagagccagccttcttattcggccttgaattgatcatatgcggattagaaaaacaacttaaatgtgaaagtgggtcttaa

SEQ ID NO: 700 - DNA, 627 bp, Artificial Sequence
  synthetic construct; Sulfonylurea responsive repressor
atgggatctagattagataaaagtaaagtgattaacagcgcattagagctgcttaatgaggtcggaatcgaaggtttaacaacccgtaaactcgcccagaagctaggtgtagagcagcctacattgtattggcatgtaaaaaataagcgagctctgctcgacgcattggccattgagatgctggataggcacgcgactcactattgccctttagaaggggaaagctggcaagattttttacgtaataacgctaaaagtatgagatgtgctttactaagtcatcgcgatggagcaaaagtatgtttaggtacaggctttacagaacagcactatgaaactgccgaaaatagtctggcctttttatgccaacaaggtttttcactagagaacgcaatgtatgcaatgcaggctgttggtatttttactttaggttgcgtattgttggatcaagagcttcaagtcgctaaagaagaaagggaaacacctactactgatagtatgccgccattagtccgacaagttctggaattaaaggatcaccaaggtgcagagccagccttcttattcggccttgaattgatcatatgcggattagaaaaacaacttaaatgtgaaagtgggtcttaa

SEQ ID NO: 701 - DNA, 627 bp, Artificial Sequence
  synthetic construct; Sulfonylurea responsive repressor
atgggatctagattagataaaagtaaagtgattaacagcgcattagagctgcttaatgaggtcggaatcgaaggtttaacaacccgtaaactcgcccagaagctaggtgtagagcagcctacattgtattggcatgtaaaaaataagcgagctctgctcgacgcaatggccattgagatgctggataggcacgcgactcactattgccctttagaaggggaaagctggcaagattttttacgtaataacgctaaaagtatgagatgtgctttactaagtcatcgcgatggagcaaaagtatgtttaggtacaggctttacagaacagcaatatgaaagtgccgaaaatagtctggcctttttatgccaacaaggtttttcactagagaacgcaatgtatgcaatgcaggctgctggtatttatactttaggttgcgtattgttggatcaagagcttcaagtcgctaaagaagaaagggaaacacctactactgatagtatgccgccattagtccgacaagctctggaattaaaggatcaccaaggtgcagagccagccttcttattcggccttgaattgatcatatgcggattagaaaaacaacttaaatgtgaaagtgggtcttaa

SEQ ID NO: 702 - DNA, 627 bp, Artificial Sequence
  synthetic construct; Sulfonylurea responsive repressor
atgggatctagattagataaaagtaaagtgattaacagcgcattagagctgcttaatgaggtcggaatcgaaggtttaacaacccgtaaactcgcccagaagctaggtgtagagcagcctacattgtattggcatgtaaaaaataagcgagctctgctcgacgcaatggccattgagatgctggataggcacgcgactcactattgccctttagaaggggaaagctggcaagattttttacgtaataacgctaaaagtatgagatgtgctttactaagtcatcgcgatggagcaaaagtatgtttaggtacaggctttacagaacagcaatatgaagctgccgaaaatagtctggcctttttatgccaacaaggtttttcactagagaacgcactgtatgcaatgcaggctgttggtatttatactttaggttgcgtattgttggatcaagagcttcaagtcgctaaagaagaaagggaaacacctactactgatagtatgccgccattagctcgacaagctctggaattaaaggatcaccaaggtgcagagccagccttcttattcggccttgaattgatcatatgcggattagaaaaacaacttaaatgtgaaagtgggtcttaa

SEQ ID NO: 703 - DNA, 627 bp, Artificial Sequence
  synthetic construct; Sulfonylurea responsive repressor
atgggatctagattagataaaagtaaagtgattaacagcgcattagagctgcttaatgaggtcggaatcgaaggtttaacaacccgtaaactcgcccagaagctaggtgtagagcagcctacattgtattggcatgtaaaaaataagcgagctctgctcgacgcaatggccattgagatgctggataggcacgcgactcacttctgccctttagaaggggaaagctggcaagattttttacgtaataacgctaaaagtatgagatgtgctttactaagtcatcgcgatggagcaaaagtatgtttaggtacaggctttacagaacagcaatatgaagctgccgaaaatagtatggcctttttatgccaacaaggtttttcactagagcacgcactgtatgcaatgcaggctgttggtatttttactttaggttgcgtattgttggatcaagagcttcaagtcgctaaagaagaaagggaaacacctactactgatagtatgccgccattagtccgacaaggtctggaattaaaggatcaccaaggtgcagagccagccttcttattcggacttgaattgatcatatgcggattagaaaaacaacttaaatgtgaaagtgggtcttaa

SEQ ID NO: 704 - DNA, 627 bp, Artificial Sequence
  synthetic construct; Sulfonylurea responsive repressor
atgggatctagattagataaaagtaaagtgattaacagcgcattagagctgcttaatgaggtcggaatcgaaggtttaacaacccgtaaactcgcccagaagctaggtgtagagcagcctacattgtattggcatgtaaaaaataagcgagctctgctcgacgcattggccattgagatgctggataggcacgcgactcactattgccctttagaaggggaaagctggcaagattttttacgtaataacgctaaaagtatgagatgtgctttactaagtcatcgcgatggagcaaaagtatgtttaggtacaggctttacagaacagatgtatgaaactgccgaaaatagtatggcctttttatgccaacaaggtttttcactagagaacgcaatgtatgcaatgcaggctgttggtatttttactttaggttgcgtattgttggatcaagagcttcaagtcgctaaagaagaaagggaaacacctactactgatagtatgccgccattagtccgacaagttctggaattaaaggatcaccaaggtgcagagccagccttcttattcggccttgaattgatcatatgcggattagaaaaacaacttaaatgtgaaagtgggtcttaa

SEQ ID NO: 705 - DNA, 627 bp, Artificial Sequence
  synthetic construct; Sulfonylurea responsive repressor
atgggatctagattagataaaagtaaagtgattaacagcgcattagagctgcttaatgaggtcggaatcgaaggtttaacaacccgtaaactcgcccagaagctaggtgtagagcagcctacattgtattggcatgtaaaaaataagcgagctctgctcgacgcattggccattgagatgctggataggcacgcgactcactattgccctttagaaggggaaagctggcaagattttttacgtaataacgctaaaagtatgagatgtgctttactaagtcatcgcgatggagcaaaagtatgtttaggtacaggctttacagaaaagcaatatgaaagtgccgaaaatagtctggcctttttatgccaacaaggtttttcactagagcacgcactgtatgcaatgcaggctgttggtatttatactttaggttgcgtattgttggatcaagagcttcaagtcgctaaagaagaaagggaaacacctactaatgatagtatgccgccattagtccgacaagttctggaattaaaggatcaccaaggtgcagagccagccttcttattcggccttgaattgatcatatgcggattagaaaaacaacttaaatgtgaaagtgggtcttaa

SEQ ID NO: 706 - DNA, 627 bp, Artificial Sequence
  synthetic construct; Sulfonylurea responsive repressor
atgggatctagattagataaaagtaaagtgattaacagcgcattagagctgcttaatgaggtcggaatcgaaggtttaacaacccgtaaactcgcccagaagctaggtgtagagcagcctacattgtattggcatgtaaaaaataagcgagctctgctcgacgcaatggccattgagatgctggataggcacgcgactcactattgccctttagaaggggaaagctggcaagattttttacgtaataacgctaaaagtatgagatgtgctttactaagtcatcgcgatggagcaaaagtatgtttaggtacaggctttacagaacagcaatatgaaactgccgaaaatagtatggcctttttatgccaacaaggtttttcactagagaacgcaatgtatgcaatgcaggctgcttgtatttatactttaggttgcgtattgttggatcaagagcttcaagtcgctaaagaagaaagggaaacacctactactgatagtatgccgccattagtccgacaagttctggaattaaaggatcaccaaggtgcagagccagccttcttattcggccttgaattgatcatatgcggattagaaaaacaacttaaatgtgaaagtgggtcttaa

SEQ ID NO: 707 - DNA, 627 bp, Artificial Sequence
  synthetic construct; Sulfonylurea responsive repressor
atgggatctagattagataaaagtaaagtgattaacagcgcattagagctgcttaatgaggtcggaatcgaaggtttaacaacccgtaaactcgcccagaagctaggtgtagagcagcctacattgtattggcatgtaaaaaataagcgagctctgctcgacgcattggccattgagatgctggataggcacgcgactcactattgccctttagaaggggaaagctggcaagattttttacgtaataacgctaaaagtatgagatgtgctttactaagtcatcgcgatggagcaaaagtatgtttaggtacaggctttacagaacagatgtatgaaactgccgaaaatagtatggcctttttatgccaacaaggtttttcactagagcacgcaatgtatgcaatgcaggctgttggtatttttactttaggttgcgtattgttggatcaagagcttcaagtcgctaaagaagaaagggaaacacctactactgatagtatgccgccattagtccgacaagctctggaattaaaggatcaccaaggtgcagagccagccttcttattcggccttgaattgatcatatgcggattagaaaaacaacttaaatgtgaaagtgggtcttaa

SEQ ID NO: 708 - DNA, 627 bp, Artificial Sequence
  synthetic construct; Sulfonylurea responsive repressor
atgggatctagattagataaaagtaaagtgattaacagcgcattagagctgcttaatgaggtcggaatcgaaggtttaacaacccgtaaactcgcccagaagctaggtgtagagcagcctacattgtattggcatgtaaaaaataagcgagctctgctcgacgcaatggccattgagatgctggataggcacgcgactcacatctgccctttagaagaggaaagctggcaagattttttacgtaataacgctaaaagtatgagatgtgctttactaagtcatcgcgatggagcaaaagtatgtttaggtacaggctttacagaacagcaatatgaaactgccgaaaatagtatggcctttttatgtcaacaaggtttttcactagagcacgcaatgtatgcaatgcaggctgcttgtatttatactttaggttgcgtattgttggatcaagagcttcaagtcgctaaagaagaaagggaaacacctactactgatagtatgccgccattagtccgacaagttctggaattaaaggatcaccaaggtgcagagccagccttcttattcggccttgaattgatcatatgcggattagaaaaacaacttaaatgtgaaagtgggtcttaa

SEQ ID NO: 709 - DNA, 627 bp, Artificial Sequence
  synthetic construct; Sulfonylurea responsive repressor
atgggatctagattagataaaagtaaagtgattaacagcgcattagagctgcttaatgaggtcggaatcgaaggtttaacaacccgtaaactcgcccagaagctaggtgtagagcagcctacattgtattggcatgtaaaaaataagcgagctctgctcgacgcaatggccattgagatgctggataggcacgcgactcactattgccctttagaaggggaaagctggcaagattttttacgtaataacgctaaaagtatgagatgtgctttactaagtcatcgcgatggagcaaaagtatgtttaggtacaggctttacagaacagcactatgaaactgccgaaaatagtatggcctttttatgccaacaaggtttttcactagagcacgcaatgtatgcaatgcaggctgctggtatttatactttaggttgcgtattgttggatcaagagcttcaagtcgctaaagaagaaagggaaacacctactactgatagtatgccgccattagtccgacaagctctggaattaaaggatcaccaaggtgcagagccagccttcttattcggccttgaattgatcatatgcggattagaaaaacaacttaaatgtgaaagtgggtcttaa

SEQ ID NO: 710 - DNA, 627 bp, Artificial Sequence
  synthetic construct; Sulfonylurea responsive repressor
atgggatctagattagataaaagtaaagtgattaacagcgcattagagctgcttaatgaggtcggaatcgaaggtttaacaacccgtaaactcgcccagaagctaggtgtagagcagcctacattgtattggcatgtaaaaaataagcgagctctgctcgacgcaatggccattgagatgctggataggcacgcgactcactattgccctttagaaggggaaagctggcaagattttttacgtaataacgctagaagtatgagatgtgctttactaagtcatcgcgatggagcaaaagtatgtttaggtacaggctttacagaacagatgtatgaaactgccgaaaatagtctggcctttttatgccaacaaggtttttcactagagaacgcaatgtatgcaatgcaggctgctggtatttatactttaggttgcgtattgttggatcaagagcttcaagtcgctaaagaagaaagggaaacacctactactgatagtatgccgccattagtccgacaagttctggaattaaaggatcaccaaggtgcagagccagccttcttattcggccttgaattgatcatatgcggattagaaaaacaacttaaatgtgaaagtgggtcttaa

SEQ ID NO: 711 - DNA, 627 bp, Artificial Sequence
  synthetic construct; Sulfonylurea responsive repressor
atgggatctagattagataaaagtaaagtgattaacagcgcattagagctgcttaatgaggtcggaatcgaaggtttaacaacccgtaaactcgcccagaagctaggtgtagagcagcctacattgtattggcatgtaaaaaataagcgagctctgctcgacgcaatggccattgagatgctggataggcacgcgactcactattgccctttagaaggggaaagctggcaagattttttacgtaataacgctaaaagtatgagatgtgctttactaagtcatcgcgatggagcaaaagtatgtttaggtacaggctttacagaacagcaatatgaaagtgccgaaaatagtctggcctttttatgccaacaaggtttttcactagagaacgcactgtatgcaatgcaggctgttggtatttatactttaggttgcgtattgttggatcaagagcttcaagtcgctaaagaagaaagggaaacacctactactgatagtatgccgccattactccgacaagctctggaattaaaggatcaccaaggtgcagagccagccttcttattcggccttgaattgatcatatgcggattagaaaaacaacttaaatgtgaaagtgggtcttaa

SEQ ID NO: 712 - DNA, 627 bp, Artificial Sequence
  synthetic construct; Sulfonylurea responsive repressor
atgggatctagattagataaaagtaaagtgattaacagcgcattagagctgcttaatgaggtcggaatcgaaggtttaacaacccgtaaactcgcccagaagctaggtgtagagcagcctacattgtattggcatgtaaaaaataagcgagctctgctcgacgcattggccattgagatgctggataggcacgcgactcactattgccctttagaaggggaaagctggcaagattttttacgtaataacgctaaaagtatgagatgtgctttactaagtcatcgcgatggagcaaaagtatgtttaggtacaggctttacagaaaagcaatatgaaagtgccgaaaatagtatggcctttttatgccaacaaggtttttcactagagcacgcactgtatgcaatgcaggctgttggtatttttactttaggttgcgtattgttggatcaagagcttcaagtcgctaaagaagaaagggaaacacctactactgatagtatgccgccattagtccgacaagttctggaattaaaggatcaccaaggtgcagagccagccttcttattcggccttgaattgatcatatgcggattagaaaaacaacttaaatgtgaaagtgggtcttaa

SEQ ID NO: 713 - DNA, 627 bp, Artificial Sequence
  synthetic construct; Sulfonylurea responsive repressor
atgggatctagattagataaaagtaaagtgattaacagcgcattagagctgcttaatgaggtcggaatcgaaggtttaacaacccgtaaactcgcccagaagctaggtgtagagcagcctacattgtattggcatgtaaaaaataagcgagctctgctcgacgcaatggccattgagatgctggataggcacgcgactcactattgccctttagaaggggaaagctggcaagattttttacgtaataacgctaaaagtatgagatgtgctttactaagtcatcgcgatggagcaaaagtatgtttaggtacaggctttacagaacagcaatatgaaagtgccgaaaatagtatggcctttttatgccaacaaggtttttcactagagcacgcactgtatgcaatgcaggctgctggtatttatactttaggttgcgtattgttgaatcaagagcttcaagtcgctaaagaagaaagggaaacacctactactgatagtatgccgccattagtccgacaaggtctggaattaaaggatcaccaaggtgcagagccagccttcttattcggccttgaattgatcatatgcggattagaaaaacaacttaaatgtgaaagtgggtcttaa

SEQ ID NO: 714 - DNA, 627 bp, Artificial Sequence
  synthetic construct; Sulfonylurea responsive repressor
atgggatctagattagataaaagtaaagtgattaacagcgcattagagctgcttaatgaggtcggaatcgaaggtttaacaacccgtaaactcgcccagaagctaggtgtagagcagcctacattgtattggcatgtaaaaaataagcgagctctgctcgacgcaatggccattgagatgctggatagtcacgcgactcactattgccctttagaaggggaaagctggcaagattttttacgtaataacgctaaaagtatgagatgtgctttactaagtcatcgcgatggagcaaaagtatgtttaggtacaggctttacagaacagcaatatgaaactgccgaaaatagtatggcctttttatgccaacaaggtttttcactagagcacgcaatgtatgcaatgcaggctgctggtatttttactttaggttgcgtattgttggatcaagagcttcaagtcgctaaagaagaaagggaaacacctactactgatagtatgccgccattagtccgacaaggtctggaattaaaggatcaccaaggtgcagagccagccttcttattcggccttgaattgatcatatgcggattagaaaaacaacttaaatgtgaaagtgggtcttaa

SEQ ID NO: 715 - DNA, 627 bp, Artificial Sequence
  synthetic construct; Sulfonylurea responsive repressor
atgggatctagattagataaaagtaaagtgattaacagcgcattagagctgcttaatgaggtcggaatcgaaggtttaacaacccgtaaactcgcccagaagctaggtgtagagcagcctacattgtattggcatgtaaaaaataagcgagctctgctcgacgcaatggccattgagatgctggataggcacgcgactcactattgccctttagaaggggaaagctggccagattttttacgtaataacgctaaaagtatgagatgtgctttactaagtcatcgcgatggagcaaaagtatgtttaggtacaggctttacagaacagcaatatgaaactgccgaaaatagtctggcctttttatgccaacaaggtttttcactagagcacgcactgtatgcaatgcaggctgttggtatttatactttaggttgcgtattgttggatcaagagcttcaagtcgctaaagaagaaagggaaacacctactactgatagtatgccgccattactccgacaaggtctggaattaaaggatcaccaaggtgcagagccagccttcttattcggccttgaattgatcatatgcggattagaaaaacaacttaaatgtgaaagtgggtcttaa

SEQ ID NO: 716 - DNA, 627 bp, Artificial Sequence
  synthetic construct; Sulfonylurea responsive repressor
atgggatctagattagataaaagtaaagtgattaacagcgcattagagctgcttaatgaggtcggaatcgaaggtttaacaacccgtaaactcgcccagaagctaggtgtagagcagcctacattgtattggcatgtaaaaaataagcgagctctgctcgacgcaatggccattgagatgctggataggcacgcgactcactattgccctttagaaggggaaagctggcaagattttttacgtaataacgctaaaagtatgagatgtgctttactaagtcatcgcgatggagcaaaagtatgtttaggtacaggctttacagaacagcaatatgaaagtgccgaaaatagtctggcctttttatgccaacaaggtttttcactagagaacgcactgtatgcaatgcaggctgttggtatttttactttaggttgcgtattgttggatcaagagcttcaagtcgctaaagaagaaagggaaacacctactactgatagtatgccgccattagtccgacaagctctggaattaaaggatcaccaaggtgcagagccagccttcttattcggccttgaattgatcatatgcggattagaaaaacaacttaaatgtgaaagtgggtcttaa

SEQ ID NO: 717 - DNA, 627 bp, Artificial Sequence
  synthetic construct; Sulfonylurea responsive repressor
atgggatctagattagataaaagtaaagtgattaacagcgcattagagctgcttaatgaggtcggaatcgaaggtttaacaacccgtaaactcgcccagaagctaggtgtagagcagcctacattgtattggcatgtaaaaaataagcgagctctgctcgacgcattggccattgagatgctggataggcacgcgactcactattgccctttagaaggggaaagctggcaagattttttacgtaataacgctaaaagtatgagatgtgctttactaagtcatcgcgatggagcaaaagtatgtttaggtacaggctttacagaaaagcaatatgaaactgccgaaaatagtctggcctttttatgccaacaaggtttttcactagagcacgcactgtatgcaatgcaggctgttggtatttatactttaggttgcgtattgttggatcaagagcttcaagtcgctaaagaagaaagggaaacacctactactgatagtatgccgccattagtccgacaaggtctggaattaaaggatcaccaaggtgcagagccagccttcttattcggccttgaattgatcatatgcggattagaaaaacaacttaaatgtgaaagtgggtcttaa

SEQ ID NO: 718 - DNA, 627 bp, Artificial Sequence
  synthetic construct; Sulfonylurea responsive repressor
atgggatctagattagataaaagtaaagtgattaacagcgcattagagctgcttaatgaggtcggaatcgaaggtttaacaacccgtaaactcgcccagaagctaggtgtagagcagcctacattgtattggcatgtaaaaaataagcgagctctgctcgacgcaatggccattgagatgctggataggcacgcgactcactattgccctttagaaggggaaagctggcaagattttttacgtaataacgctaaaagtatgagatgtgctttactaagtcatcgcgatggagcaaaagtatgtttaggtacaggctttacagaacagcaatatgaaactgccgaaaatagtatggcctttttatgccaacaaggtttttcactagagcacgcactgtatgcaatgcaggctgttggtatttatactttaggttgcgtattgttggatcaagagcttcaagtcgctaaagaagaaagggaaacacctactactgatagtatgccgccattagtccgacaaggtctggaattaaaggatcaccaaggtgcagagccagccttcttattcggccttgaattgatcatatgcggattagaaaaacaacttaaatgtgaaagtgggtcttaa

SEQ ID NO: 719 - DNA, 627 bp, Artificial Sequence
  synthetic construct; Sulfonylurea responsive repressor
  misc_feature (328)..(328): n is a, c, g, or t
  misc_feature (422)..(422): n is a, c, g, or t
  misc_feature (521)..(521): n is a, c, g, or t
atgggatctagattagataaaagtaaagtgattaacagcgcattagagctgcttaatgaggtcggaatcgaaggtttaacaacccgtaaactcgcccagaagctaggtgtagagcagcctacattgtattggcatgtaaaaaataagcgagctctgctcgacgcaatggccattgagatgctggataggcacgcgactcactattgccctttagaaggggaaagctggcaagattttttacgtaataacgctaaaagtatgagatgtgctttactaagtcatcgcgatggagcaaaagtatgtttaggtacaggctttacagaacagntgtatgaagctgccgaaaatagtctggcctttttatgccaacaaggtttttcactagagcacgcactgtatgcaatgcaggctgttggtatttntactttaggttgcgtattgttggatcaagagcttcaagtcgctaaagaagaaagggaaacacctactactgatagtatgccgccattagtccgacaagntctggaattaaaggatcaccaaggtgcagagccagccttcttattcggccttgaattgatcatatgcggattagaaaaacaacttaaatgtgaaagtgggtcttaa

SEQ ID NO: 720 - DNA, 627 bp, Artificial Sequence
  synthetic construct; Sulfonylurea responsive repressor
atgggatctagattagataaaagtaaagtgattaacagcgcattagagctgcttaatgaggtcggaatcgaaggtttaacaacccgtaaactcgcccagaagctaggtgtagagcagcctacattgtattggcatgtaaaaaataagcgagctctgctcgacgcattggccattgagatgctggataggcacgcgactcactattgccctttagaaggggaaagctggcaagattttttacgtaataacgctaaaagtatgagatgtgctttactaagtcatcgcgatggagcaaaagtatgtttaggtacaggctttacagaacagcactatgaaactgccgaaaatagtatggcctttttatgccaacaaggtttttcactagagcacgcaatgtatgcaatgcaggctgctggtatttttactttaggttgcgtattgttggatcaagagcttcaagtcgctaaagaagaaagggaaacacctactactgatagtatgccgccattagtccgacaaggtctggaattaaaggatcaccaaggtgcagagccagccttcttattcggccttgaattgatcatatgcggattagaaaaacaacttaaatgtgaaagtgggtcttaa

SEQ ID NO: 721 - DNA, 627 bp, Artificial Sequence
  synthetic construct; Sulfonylurea responsive repressor
atgggatctagattagataaaagtaaagtgattaacagcgcattagagctgcttaatgaggtcggaatcgaaggtttaacaacccgtaaactcgcccagaagctaggtgtagagcagcctacattgtattggcatgtaaaaaataagcgagctctgctcgacgcaatggccattgagatgctggataggcacgcgactcactattgccctttagaaggggaaagctggcaagattttttacgtaataacgctaaaagtatgagatgtgctttactaagtcatcgcgatggagcaaaagtatgtttaggtacaggctttacagaacagcaatatgaaactgccgaaaatagtctggcctttttatgccaacaaggtttttcactagagcacgcaatgtatgcaatgcaggctgttggtatttttactttaggttgcgtattgttggatcaagagcttcaagtcgctaaagaagaaagggaaacacctactactgatagtatgccgccattagtccgacaaggtctggaattaaaggatcaccaaggtgcagagccagccttcttattcggccttgaattgatcatatgcggattagaaaaacaacttaaatgtgaaagtgggtcttaa

SEQ ID NO: 722 - DNA, 627 bp, Artificial Sequence
  synthetic construct; Sulfonylurea responsive repressor
atgggatctagattagataaaagtaaagtgattaacagcgcattagagctgcttaatgaggtcggaatcgaaggtttaacaacccgtaaactcgcccagaagctaggtgtagagcagcctacattgtattggcatgtaaaaaataagcgagctctgctcgacgcattggccattgagatgctggataggcacgcgactcactattgccctttagaaggggaaagctggcaagattttttacgtaataacgctaaaagtatgagatgtgctttactaagtcatcgcgatggagcaaaagtatgtttaggtacaggctttacagaaaagcaatatgaaactgccgaaaatagtctggcctttttatgccaacaaggtttttcactagagaacgcactgtatgcaatgcaggctgctggtatttatactttaggttgcgtattgttggatcaagagcttcaagtcgctaaagaagaaagggaaacacctactactgatagtatgccgccattagtccgacaagttctggaattaaaggatcaccaaggtgcagagccagccttcttattcggccttgaattgatcatatgcggattagaaaaacaacttaaatgtgaaagtgggtcttaa

SEQ ID NO: 723 - DNA, 627 bp, Artificial Sequence
  synthetic construct; Sulfonylurea responsive repressor
atgggatctagattagataaaagtaaagtgattaacagcgcattagagctgcttaatgaggtcggaatcgaaggtttaacaacccgtaaactcgcccagaagctaggtgtagagcagcctacattgtattggcatgtaaaaaataagcgagctctgctcgacgcattggccattgagatgctggataggcacgcgactcactattgccctttagaaggggaaagctggcaagattttttacgtaataacgctaaaagtatgagatgtgctttactaagtcatcgcgatggagcaaaagtatgtttaggtacaggctttacagaacagcaatatgaagctgccgaaaatagtatggcctttttatgccaacaaggtttttcactagagcacgcaatgtatgcaatgcaggctgctggtatttatactttaggttgcgtattgttggatcaagagcttcaagtcgctaaagaagaaagggaaacacctactactgatagtatgccgccattactccgacaagctctggaattaaaggatcaccaaggtgcagagccagccttcttattcggccttgaattgatcatatgcggattagaaaaacaacttaaatgtgaaagtgggtcttaa

SEQ ID NO: 724 - DNA, 627 bp, Artificial Sequence; identical to SEQ ID NO: 713
  synthetic construct; Sulfonylurea responsive repressor

SEQ ID NO: 725 - DNA, 627 bp, Artificial Sequence
  synthetic construct; Sulfonylurea responsive repressor
  misc_feature (203)..(204): n is a, c, g, or t
  misc_feature (337)..(337): n is a, c, g, or t
atgggatctagattagataaaagtaaagtgattaacagcgcattagagctgcttaatgaggtcggaatcgaaggtttaacaacccgtaaactcgcccagaagctaggtgtagagcagcctacattgtattggcatgtaaaaaataagcgagctctgctcgacgcaatggccattgagatgctggataggcacgcgactcactnntgccctttagaaggggaaagctggcaagattttttacgtaataacgctaaaagtatgagatgtgctttactaagtcatcgcgatggagcaaaagtatgtttaggtacaggctttacagaacagatgtatgaangtgccgaaaatagtatggcctttttatgccaacaaggtttttcactagagmacgcaatgtatgcaatgcaggctgttggtatttttactttaggttgcgtattgttggatcaagagcttcaagtcgctaaagaagaaagggaaacacctactactgatagtatgccgccattagyccgacaagttctggaattaaaggatcaccaaggtgcagagccagccttcttattcggccttgaattgatcatatgcggattagaaaaacaacttaaatgtgaaagtgggtcttaa

SEQ ID NO: 726 - DNA, 627 bp, Artificial Sequence
  synthetic construct; Sulfonylurea responsive repressor
atgggatctagattagataaaagtaaagtgattaacagcgcattagagctgcttaatgaggtcggaatcgaaggtttaacaacccgtaaactcgcccagaagctaggtgtagagcagcctacattgtattggcatgtaaaaaataagcgagctctgctcgacgcaatggccattgagatgctggataggcacgcgactcactattgccctttagaaggggaaagctggcaagattttttacgtaataacgctaaaagtatgagatgtgctttactaagtcatcgcgatggagcaaaagtatgtttaggtacaggctttacagaacagcaatatgaaactgccgaaaatagtctggcctttttatgccaacaaggtttttcactagagcacgcactgtatgcaatgcaggctgttggtatttatactttaggttgcgtattgttggatcaagagcttcaagtcgctaaagaagaaagggaaacacctactactgatagtatgccgccattagtccgacaagctctggaattaaaggatcaccaaggtgcagagccagccttcttattcggccttgaattgatcatatgcggattagaaaaacaacttaaatgtgaaagtgggtcttaa

SEQ ID NO: 727 - DNA, 627 bp, Artificial Sequence
  synthetic construct; Sulfonylurea responsive repressor
atgggatctagattagataaaagtaaagtgattaacagcgcattagagctgcttaatgaggtcggaatcgaaggtttaacaacccgtaaactcgcccagaagctaggtgtagagcagcctacattgtattggcatgtaaaaaataagcgagctctgctcgacgcaatggccattgagatgctggataggcacgcgactcactattgccctttagaaggggaaagctggcaagattttttacgtaataacgctaaaagtatgagatgtgctttactaagtcatcgcgatggagcaaaagtatgtttaggtacaggctttacagaacagcaatatgaaactgccgaaaatagtatggcctttttatgccaacaaggtttttcactagagcacgcaatgtatgcaatgcaggctgcttgtatttttactttaggttgcgtattgttggatcaagagcttcaagtcgctaaagaagaaagggaaacacctactactgatagtatgccgccattagtccgacaagttctggaattaaaggatcaccaaggtgcagagccagccttcttattcggccttgaattgatcatatgcggattagaaaaacaacttaaatgtgaaagtgggtcttaa

SEQ ID NO: 728 - DNA, 627 bp, Artificial Sequence
  synthetic construct; Sulfonylurea responsive repressor
atgggatctagattagataaaagtaaagtgattaacagcgcattagagctgcttaatgaggtcggaatcgaaggtttaacaacccgtaaactcgcccagaagctaggtgtagagcagcctacattgtattggcatgtaaaaaataagcgagctctgctcgacgcattggccattgagatgctggataggcacgcgactcactattgccctttagaaggggaaagctggcaagattttttacgtaataacgctaaaagtatgagatgtgctttactaagtcatcgcgatggagcaaaagtatgtttaggtacaggctttacagaacagatgtatgaaactgccgaaaatagtctggcctttttatgccaacaaggtttttcactagagcacgcactgtatgcaatgcaggctgttggtatttttactttaggttgcgtattgttggatcaagagcttcaagtcgctaaagaagaaagggaaacacctactactgatagtatgccgccattagtccgacaaggtctggaattaaaggatcaccaaggtgcagagccagccttcttattcggccttgaattgatcatatgcggattagaaaaacaacttaaatgtgaaagtgggtcttaa

SEQ ID NO: 729 - DNA, 627 bp, Artificial Sequence
  synthetic construct; Sulfonylurea responsive repressor
atgggatctagattagataaaagtaaagtgattaacagcgcattagagctgcttaatgaggtcggaatcgaaggtttaacaacccgtaaactcgcccagaagctaggtgtagagcagcctacattgtattggcatgtaaaaaataagcgagctctgctcgacgcaatggccattgagatgctggataggcacgcgactcacatgtgccctttagaaggggaaagctggcaagattttttacgtaataacgctaaaagtatgagatgtgctttactaagtcatcgcgatggagcaaaagtatgtttaggtacaggctttacagaacagatgtatgaaagtgccgaaaatagtatggcctttttatgccaacaaggtttttcactagagaacgcaatgtatgcaatgcaggctgttggtatttttactttaggttgcgtattgttggatcaagagcttcaagtcgctaaagaagaaagggaaacacctactactgatagtatgccgccattagctcgacaagttctggaattaaaggatcaccaaggtgcagagccagccttcttattcggccttgaattgatcatatgcggattagaaaaacaacttaaatgtgaaagtgggtcttaa

SEQ ID NO: 730 - DNA, 627 bp, Artificial Sequence
  synthetic construct; Sulfonylurea responsive repressor
atgggatctagattagataaaagtaaagtgattaacagcgcattagagctgcttaatgaggtcggaatcgaaggtttaacaacccgtaaactcgcccagaagctaggtgtagagcagcctacattgtattggcatgtaaaaaataagcgagctctgctcgacgcaatggccattgagatgctggataggcacgcgactcacatgtgccctttagaaggggaaagctggcaagattttttacgtaataacgctaaaagtatgagatgtgctttactaagtcatcgcgatggagcaaaagtatgtttaggtacaggctttacagaacagatgtatgaaactgccgaaaatagtatggcctttttatgccaacaaggtttttcactagagaacgcaatgtatgcaatgcaggctgctggtatttatactttaggttgcgtattgttggatcaagagcttcaagtcgctaaagaagaaagggaaacacctactactgatagtatgccgccattagtccgacaagttctggaattaaaggatcaccaaggtgcagagccagccttcttattcggccttgaattgatcatatgcggattagaaaaacaacttaaatgtgaaagtgggtcttaa

SEQ ID NO: 731 - DNA, 627 bp, Artificial Sequence
  synthetic construct; Sulfonylurea responsive repressor
atgggatctagattagataaaagtaaagtgattaacagcgcattagagctgcttaatgaggtcggaatcgaaggtttaacaacccgtaaactcgcccagaagctaggtgtagagcagcctacattgtattggcatgtaaaaaataagcgagctctgctcgacgcattggccattgagatgctggataggcacgcgactcactattgccctttagaaggggaaagctggcaagattttttacgtaataacgctaaaagtatgagatgtgctttactaagtcatcgcgatggagcaaaagtatgtttaggtacaggctttacagaacagatgtatgaaagtgccgaaaatagtctggcctttttatgccaacaaggtttttcactagagaacgcaatgtatgcaatgcaggctgctggtatttttactttaggttgcgtattgttggatcaagagcttcaagtcgctaaagaagaaagggaaacacctactactgatagtatgccgccattagtccgacaagttctggaattaaaggatcaccaaggtgcagagccagccttcttattcggccttgaattgatcatatgcggattagaaaaacaacttaaatgtgaaagtgggtcttaa

SEQ ID NO: 732 - DNA, 627 bp, Artificial Sequence
  synthetic construct; Sulfonylurea responsive repressor
atgggatctagattagataaaagtaaagtgattaacagcgcattagagctgcttaatgaggtcggaatcgaaggtttaacaacccgtaaactcgcccagaagctaggtgtagagcagcctacattgtattggcatgtaaaaaataagcgagctctgctcgacgcaatggccattgagatgctggataggcacgcgactcacttctgccctttagaaggggaaagctggcaagattttttacgtaataacgctaaaagtatgagatgtgctttactaagtcatcgcgatggagcaaaagtatgtttaggtacaggctttacagaacagcaatatgaaggtgccgaaaatagtatggcctttttatgccaacaaggtttttcactagagaacgcaatgtatgcaatgcaggctgctggtatttttactttaggttgcgtattgttggatcaagagcttcaagtcgctaaagaagaaagggaaacacctactactgatagtatgccgccattagtccgacaagttctggaattaaaggatcaccaaggtgcagagccagccttcttattcggccttgaattgatcatatgcggattagaaaaacaacttaaatgtgaaagtgggtcttaa

SEQ ID NO: 733 - DNA, 627 bp, Artificial Sequence
  synthetic construct; Sulfonylurea responsive repressor
  misc_feature (244)..(244): n is a, c, g, or t
  misc_feature (521)..(521): n is a, c, g, or t
atgggatctagattagmyaaaagtaaagtgattaacagcgcattagagctgcttaatgaggtcggaatcgaaggtttaacaacccgtaaactcgcccagaagctaggtgtagagcagcctacattgtattggcatgtaaaaaataagcgagctctgctcgacgcattggccattgagatgctggataggcacgcgactcactattgccctttagaaggggaaagctggcaagattttttacgtnataacgctaaaagtatgagatgtgctttactaagtcatcgcgatggagcaaaagtatgtttaggtacaggctttacagaacagmtgtatgaaactgccgaaaatagtctggcctttttatgccaacaaggtttttcactagagmacgcactgtatgcaatgcaggctgttggtatttatactttaggttgcgtattgttggatcaagagcttcaagtcgctaaagaagaaagggaaacacctactactgatagtatgccgccattactccgacaagntctggaattaaaggatcaccaaggtgcagagccagccttcttattcggccttgaattgatcatatgcggattagaaaaacaacttaaatgtgaaagtgggtcttaa

SEQ ID NO: 734 - DNA, 627 bp, Artificial Sequence
  synthetic construct; Sulfonylurea responsive repressor
  misc_feature (573)..(573): n is a, c, g, or t
atgggatctagattagataaaagtaaagtgattaacagcgcattagagctgcttaatgaggtcggaatcgaaggtttaacaacccgtaaactcgcccagaagctaggtgtagagcagcctacattgtattggcatgtaaaaaataagcgagctctgctcgacgcaatggccattgagatgctggataggcacgcgactcactattgccctttagaaggggaaagctggcaagattttttacgtaataacgctaaaagtatgagatgtgctttactaagtcatcgcgatggagcaaaagtatgtttaggtacaggctttacagaacagcaatatgaaactgccgaaaatagtatggcctttttatgccaacaaggtttttcactagagcacgcactgtatgcaatgcaggctgctggtatttatactttaggttgcgtattgttggatcaagagcttcaagtcgctaaagaagaaagggaaacacctactactgatagtatgccgccattactccgacaaggtctggaattaaaggatcaccaaggtgcagagccagccttcttattcggcctngaattgatcatatgcggattagaaaaacaacttaaatgtgaaagtgggtcttaa

SEQ ID NO: 735 - DNA, 627 bp, Artificial Sequence
  synthetic construct; Sulfonylurea responsive repressor
atgggatctagattagataaaagtaaagtgattaacagcgcattagagctgcttaatgaggtcggaatcgaaggtttaacaacccgtaaactcgcccagaagctaggtgtagagcagcctacattgtattggcatgtaaaaaataagcgagctctgctcgacgcaatggccattgagatgctggataggcacgcgactcactattgccctttagaaggggaaagctggcaagattttttacgtaataacgctaaaagtatgagatgtgctttactaagtcatcgcgatggagcaaaagtatgtttaggtacaggctttacagaacagcaatatgaaactgccgaaaatagtatggcctttttatgccaacaaggtttttcactagagaacgcaatgtatgcaatgcaggctgctggtatttttactttaggttgcgtattgttggatcaagagcttcaagtcgctaaagaagaaagggaaacacctactactgatagtatgccgccattagtccgacaagttctggaattaaaggatcaccaaggtgcagagccagccttcttattcggccttgaattgatcatatgcggattagaaaaacaacttaaatgtgaaagtgggtcttaa

SEQ ID NO: 736 - DNA, 627 bp, Artificial Sequence
  synthetic construct; Sulfonylurea responsive repressor
atgggatctagattagataaaagtaaagtgattaacagcgcattagagctgcttaatgaggtcggaatcgaaggtttaacaacccgtaaactcgcccagaagctaggtgtagagcagcctacattgtattggcatgtaaaaaataagcgagctctgctcgacgcaatggccattgagatgctggataggcacgcgactcactattgccctttagaaggggaaagctggcaagattttttacgtaataacgctagaagtatgagatgtgctttactaagtcatcgcgatggagcaaaagtatgtttaggtacaggctttacagaacagatgtatgaaactgccgaaaatagtctggcctttttatgccaacaaggtttttcactagagaacgcactgtatgcaatgcaggctgctggtatttatactttaggttgcgtattgttggatcaagagcttcaagtcgctaaagaagaaagggaaacacctactactgatagtatgccgccattagtccgacaagttctggaattaaaggatcaccaaggtgcagagccagccttcttattcggccttgaattgatcatatgcggattagaaaaacaacttaaatgtgaaagtgggtcttaa

SEQ ID NO: 737 - DNA, 627 bp, Artificial Sequence
  synthetic construct; Sulfonylurea responsive repressor
atgggatctagattagataaaagtaaagtgattaacagcgcattagagctgcttaatgaggtcggaatcgaaggtttaacaacccgtaaactcgcccagaagctaggtgtagagcagcctacattgtattggcatgtaaaaaataagcgagctctgctcgacgcattggccattgagatgctggataggcacgcgactcactattgccctttagaaggggaaagctggcaagattttttacgtaataacgctaaaagtatgagatgtgctttactaagtcatcgcgatggagcaaaagtatgtttaggtacaggctttacagaacagatgtatgaaactgccgaaaatagtctggcctttttatgccaacaaggtttttcactagagaacgcactgtatgcaatgcaggctgctggtatttttactttaggttgcgtattgttggatcaagagcttcaagtcgctaaagaagaaagggaaacacctactactgatagtatgccgccattagtccgacaagctctggaattaaaggatcaccaaggtgcagagccagccttcttattcggccttgaattgatcatatgcggattagaaaaacaacttaaatgtgaaagtgggtcttaa

SEQ ID NO: 738 - DNA, 627 bp, Artificial Sequence
  synthetic construct; Sulfonylurea responsive repressor
atgggatctagattagataaaagtaaagtgattaacagcgcattagagctgcttaatgaggtcggaatcgaaggtttaacaacccgtaaactcgcccagaagctaggtgtagagcagcctacattgtattggcatgtaaaaaataagcgagctctgctcgacgcaatggccattgagatgctggataggcacgcgactcactattgccctttagaaggggaaagctggcaagattttttacgtaataacgctaaaagtatgagatgtgctttactaagtcatcgcgatggagcaaaagtatgtttaggtacaggctttacagaacagcaatatgaaagtgccgaaaatagtatggcctttttatgccaacaaggtttttcactagagcacgcaatgtatgcaatgcaggctgctggtatttatactttaggttgcgtattgttggatcaagagcttcaagtcgctaaagaagaaagggaaacacctactactgatagtatgccgccattactccgacaagttctggaattaaatgatcaccaaggtgcagagccagccttcttattcggccttgaattgatcatatgcggattagaaaaacaacttaaatgtgaaagtgggtcttaa

SEQ ID NO: 739 - DNA, 627 bp, Artificial Sequence; identical to SEQ ID NO: 738
  synthetic construct; Sulfonylurea responsive repressor

SEQ ID NO: 740 - DNA, 627 bp, Artificial Sequence
  synthetic construct; Sulfonylurea responsive repressor
atgggatctagattagataaaagtaaagtgattaacagcgcattagagctgcttaatgaggtcggaatcgaaggtttaacaacccgtaaactcgcccagaagctaggtgtagagcagcctacattgtattggcatgtaaaaaataagcgagctctgctcgacgcaatggcctttgagatgctggataggcacgcgactcactattgccctttagaaggggaaagctggcaagattttttacgtaataacgctaaaagtatgagatgtgctttactaagtcatcgcgatggagcaaaagtatgtttaggtacaggctttacagaacagcaatatgaaactgccgaaaatagtatggcctttttatgccaacaaggtttttcactagagaacgcactgtatgcaatgcaggctgtttgtatttatactttaggttgcgtattgttggatcaagagcttcaagtcgctaaagaagaaagggaaacacctactactgatagtatgccgccattactccgacaagctctggaaataaaggatcaccaaggtgcagagccagccttcttattcggccttgaattgatcatatgcggattagaaaaacaacttaaatgtgaaagtgggtcytaa

SEQ ID NO: 741 - DNA, 627 bp, Artificial Sequence
  synthetic construct; Sulfonylurea responsive repressor
atgggatctagattagataaaagtaaagtgattaacagcgcattagagctgcttaatgaggtcggaatcgaaggtttaacaacccgtaaactcgcccagaagctaggtgtagagcagcctacattgtattggcatgtaaaaaataagcgagctctgctcgacgcaatggccattgagatgctggataggcacgcgactcactattgccctttagaaggggaaagctggcaagattttttacgtaataacgctaaaagtatgagatgtgctttactaagtcatcgcgatggagcaaaagtatgtttaggtacaggctttacagaacagcaatatgaaactgccgaaaatagtctggcctttttatgccaacaaggtttttcactagagcacgcactgtatgcaatgcaggctgttggtatttatactttaggctgcgtattgttggatcaagagcttcaagtcgctaaagaagaaagggaaacacctactactgatagtatgccgccattagtccgacaaggtctggaattaaaggatcaccaaggtgcagagccagccttcttattcggccttgaattgatcatatgcggattagaaaaacaacttaaatgtgaaagtgggtcttaa

SEQ ID NO: 742 - DNA, 627 bp, Artificial Sequence
  synthetic construct; Sulfonylurea responsive repressor
atgggatctagattagataaaagtaaagtgattaacagcgcattagagctgcttaatgaggtcggaatcgaaggtttaacaacccgtaaactcgcccagaagctaggtgtagagcagcctacattgtattggcatgtaaaaaataagcgagctctgctcgacgcattggccattgagatgctggataggcacgcgactcacgtgtgccctttagaaggggaaagctggcaagattttttacgtaataccgctaaaagtatgagatgtgctttactaagtcatcgcgatggagcaaaagtatgtttaggtacaggctttacagaacagcaatatgaagctgccgaaaatagtatggcctttttatgccaacaaggtttttcactagagcacgcgctgtatgcaatgcaggctgctggtatttttactttaggttgcgtattgttggatcaagagcttcaagtcgctaaagaagaaagggaaacacctactactgatagtatgccgccattagtccgacaagttctggaattaaaggatcaccaaggtgcagagccagccttcttattcggccttgaattgatcatatgcggattagaaaaacaacttaaatgtgaaagtgggtcttaa

SEQ ID NO: 743 - DNA, 627 bp, Artificial Sequence
  synthetic construct; Sulfonylurea responsive repressor
atgggatctagattagataaaagtaaagtgattaacagcgcattagagctgcttaatgaggtcggaatcgaaggtttaacaacccgtaaactcgcccagaagctaggtgtagagcagcctacattgtattggcatgtaaaaaataagcgagctctgctcgacgcaatggccattgagatgctggataggcacgcgactcacatctgccctttagaaggggaaagctggcaagattttttacgtaataacgctaaaagtatgagatgtgctttactaagtcatcgcgatggagcaaaagtatgtttaggtacaggctttacagaacagcaatatgaagctgccgaaaatagtctggcctttttatgccaacaaggtttttcactagagcacgcactgtatgcaatgcaggctgttggtatttatactttaggttgcgtattgttggatcaagagcttcaagtcgctaaagaagaaagggaaacacctactactgatagtatgccgccattagtccgacaagctctggaattaaaggatcaccaaggtgcagagccagccttcttattcggccttgaattgatcatatgcggattagaaaaacaacttaaatgtgaaagtgggtcttaa

SEQ ID NO: 744 - DNA, 627 bp, Artificial Sequence
  synthetic construct; Sulfonylurea responsive repressor
atgggatctagattagataaaagtaaagtgattaacagcgcattagagctgcttaatgaggtcggaatcgaaggtttaacaacccgtaaactcgcccagaagctaggtgtagagcagcctacattgtattggcatgtaaaaaataagcgagctctgctcgacgcattggccattgagatgctggataggcacgcgactcactattgccctttagaaggggaaagctggcaagattttttacgtaataacgctaaaagtatgagatgtgctttactaagtcatcgcgatggagcaaaagtatgtttaggtacaggctttacagaaaagcaatatgaaactgccgaaaatagtctggcctttttatgccaacaaggtttttcactagagaacgcactgtatgcaatgcaggctgttggtatttttactttaggttgcgtattgttggatcaagagcttcaagtcgctaaagaagaaagggaaacacctactactgatagtatgccgccattagtccgacaagctctggaattaaaggatcaccaaggtgcagagccagccttcttattcggccttgaattgatcatatgcggattagaaaaacaacttaaatgtgaaagtgggtcttaa

SEQ ID NO: 745 - DNA, 627 bp, Artificial Sequence
  synthetic construct; Sulfonylurea responsive repressor
atgggatctagattagataaaagtaaagtgattaacagcgcattagagctgcttaatgaggtcggaatcgaaggtttaacaacccgtaaactcgcccagaagctaggtgtagagcagcctacattgtattggcatgtaaaaaataagcgagctctgctcgacgcaatggccattgagatgctggataggcacgcgactcacttgtgccctttagaaggggaaagctggcaagattttttacgtaataacgctaaaagtatgagaagtgctttactaattcatcgcgatggagcaaaagtatgtttaggtacaggctttacagaacagcaatatgaagctgccgaaaatagtatggcctttttatgccaacaaggtttttcactagagaacgcaatgtatgcaatgcaggctgttggtatttatactttaggttgcgtattgttggatcaagagcttcaagtcgctaaagaagaaagggaaacacctactactgatcgtatgccgccattagctcgacaagctctggaattaaaggatcaccaaggtgcagagccagccttcttattcggccttgaattgatcatatgcggattagaaaaacaacttaaatgtgaaagtgggtcttaa

SEQ ID NO: 746 - DNA, 627 bp, Artificial Sequence
  synthetic construct; Sulfonylurea responsive repressor
atgggatctagattagataaaagtaaagtgattaacagcgcattagagctgcttaatgaggtcggaatcgaaggtttaacaacccgtaaactcgcccagaagctaggtgtagagcagcctacattgtattggcatgtaaaaaataagcgagctctgctcgacgcaatggccattgagatgctggataggcacgcgactcactattgccctttagaaggggaaagctggcaagattttttacgtaataacgctaaaagtatgagatgtgctttactaagtcatcgcgatggagcaaaagtatgtttaggtacaggctttacagaacagcaatatgaagctgccgaaaatagtctggcctttttatgccaacaaggtttttcactagagaacgcaatgtatgcaatgcaggctgctggtatttatactttaggttgcgtattgttggatcaagagcttcaagtcgctaaagaagaaagggaaacacctactactgatagtatgccgccattagtccgacaaggtctggaattaaaggatcaccaaggtgcagagccagccttcttattcggccttgaattgatcatatgcggattagaaaaacaacttaaatgtgaaagtgggtcttaa

SEQ ID NO: 747 - DNA, 627 bp, Artificial Sequence
  synthetic construct; Sulfonylurea responsive repressor
atgggatctagattagataaaagtaaagtgattaacagcgcattagagctgcttaatgaggtcggaatcgaaggtttaacaacccgtaaactcgcccagaagctaggtgtagagcagcctacattgtattggcatgtaaaaaataagcgagctctgctcgacgcaatggccattgagatgctggataggcacgcgactcactattgccctttagaaggggaaagctggcaagattttttacgtaataacgctaaaagtatgagatgtgctttactaagtcatcgcgatggagcaaaagtatgtttaggtacaggctttacagaacagcaatatgaagctgccgaaaatagtatggcctttttatgccaacaaggtttttcactagagaacgcaatgtattcaatgcaggctgttggtatttttactttaggttgcgtattgttggatcaagagcttcaagtcgctaaagaagaaagggaaacacctactactgatagtatgccgccattagtccgacaaggtctggaattaaaggatcaccaaggtgcagagccagccttcttattcggccttgaattgatcatatgcggattagaaaaacaacttaaatgtgaaagtgggtcttaa

SEQ ID NO: 748 - DNA, 627 bp, Artificial Sequence
  synthetic construct; Sulfonylurea responsive repressor
atgggatctagattagataaaagtaaagtgattaacagcgcattagagctgcttaatgaggtcggaatcgaaggtttaacaacccgtaaactcgcccagaagctaggtgtagagcagcctacattgtattggcatgtaaaaaataagcgagctctgctcgacgcattggccattgagatgctggataggcacgcgactcactattgccctttagaaggggaaagctggcaagattttttacgtaataacgctaaaagtatgagatgtgctttactaagtcatcgcgatggagcaaaagtatgtttaggtacaggctttacagaaaagcaatatgaaagtgccgaaaatagtctggcctttttatgccaacaaggtttttcactagagcacgcactgtatgcaatgcaggctgttggtatttatactttaggttgcgtattgttggatcaagagcttcaagtcgctaaagaagaaagggaaacacctactactgatagtatgccgccattagtccgacaagctctggaattaaaggatcaccaaggtgcagagccagccttcttattcggccttgaattgatcatatgcggatttgaaaaacaacttaaatgtgaaagtgggtcttaa

SEQ ID NO: 749 - DNA, 627 bp, Artificial Sequence
  synthetic construct; Sulfonylurea responsive repressor
  misc_feature (328)..(328): n is a, c, g, or t
  misc_feature (511)..(511): n is a, c, g, or t
atgggatctagattagataaaagtaaagtgattaacagcgcattagagctgcttaatgaggtcggaatcgaaggtttaacaacccgtaaactcgcccagaagctaggtgtagagcagcctacattgtattggcatgtaaaaaataagcgagctctgctcgacgcaatggccattgagatgctggataggcacgcgactcactattgccctttagaaggggaaagctggcaagattttttacgtaataacgctaaaagtatgagatgtgctttactaagtcatcgcgatggagcaaaagtatgtttaggtacaggctttacagaacagntgtatgaaactgccgaaaatagtatggcctttttatgccaacaaggtttttcactagagaacgcactgtatgcaatgcaggctgctggtatttatactttaggttgcgtattgttggatcaagagcttcaagtcgctaaagaagaaagggaaacacctactactgatagtatgccgccattantccgacaagctctggaattaaaggatcaccaaggtgcagagccagccttcttattcggccttgaattgatcatatgcggattagaaaaacaacttaaatgtgaaagtgggtcttaa

SEQ ID NO: 750 - DNA, 627 bp, Artificial Sequence
  synthetic construct; Sulfonylurea responsive repressor
atgggatctagattagataaaagtaaagtgattaacagcgcattagagctgcttaatgaggtcggaatcgaaggtttaacaacccgtaaactcgcccagaagctaggtgtagagcagcctacattgtattggcatgtaaaaaataagcgagctctgctcgacgcaatggccattgagatgctggataggcacgcgactcactattgccctttagaaggggaaagctggcaagattttttacgtaataacgctaaaagtatgagatgtgctttactaagtcatcgcgatggagcaaaagtatgtttaggtacaggctttacagaacagcaatatgaaactgccgaaaatagtatggcctttttatgccaacaaggtttttcactagagaacgcaatgtatgcaatgcaggctgctggtatttttactttaggttgcgtattgttggatcaagagcttcgagtcgctaaagaagaaagggaaacacctactactgatagtatgccgccattactccgacaagttctggaattaaaggatcaccaaggtgcagagccagccttcttattcggccttgaattgatcatatgcggattagaaaaacaacttaaatgtgaaagtgggtcttaa

SEQ ID NO: 751 - DNA, 627 bp, Artificial Sequence
  synthetic construct; Sulfonylurea responsive repressor
atgggatctagattagataaaagtaaagtgattaacagcgcattagagctgcttaatgaggtcggaatcgaaggtttaacaacccgtaaactcgcccagaagctaggtgtagagcagcctacattgtattggcatgtaaaaaataagcgagctctgctcgacgcaatggccattgagatgctggataggcacgcgactcactattgccctttagaaggggaaagctggcaagattttttacgtaataacgctaaaagtatgagatgtgctttactaagtcatcgcgatggagcaaaagtatgtttaggtacaggctttacagaacagcaatatgaaactgccgaaaatagtctggcctttttatgccaacaaggtttttcactagagaacgcaatgtatgcaatgcaggctgttggtatttttactttaggttgcgtattgttggatcaagagcttcaagtcgctaaagaagaaagggaaacacctactactgatagtatgccgccattactccgacaagttctggaattaaaggatcaccaaggtgcagagccagccttcttattcggccttgaattgatcatatgcggattagaaaaacaacttaaatgtgaaagtgggtcttaa

SEQ ID NO: 752 - DNA, 627 bp, Artificial Sequence
  synthetic construct; Sulfonylurea responsive repressor
atgggatctagattagataaaagtaaagtgattaacagcgcattagagctgcttaatgaggtcggaatcgaaggtttaacaacccgtaaactcgcccagaagctaggtgtagagcagcctacattgtattggcatgtaaaaaataagcgagctctgctcgacgcaatggccattgagatgctggataggcacgcgactcactattgccctttagaaggggaaagctggcaagattttttacgtaataacgctaaaagtatgagatgtgctttactaagtcatcgcgatggagcaaaagtatgtttaggtacaggctttacagaacagcaatatgaaggtgccgaaaatagtatggcctttttatgccaacaaggtttttcactagagaacgcactgtatgcaatgcaggctgttggtatttatactttaggttgcgtattgttggatcaagagcttcaagtcgctaaagaagaaagggaaacacctactactgatagtatgccgtcattagtccgacaagttctggaattaaaggatcaccaaggtgcagagccagccttcttattcggccttgaattgatcatatgcggattagaaaaacaacttaaatgtgaaagtgggtcttaa

SEQ ID NO: 753 - DNA, 627 bp, Artificial Sequence
  synthetic construct; Sulfonylurea responsive repressor
  misc_feature (166)..(166): n is a, c, g, or t
  misc_feature (337)..(337): n is a, c, g, or t
atgggatctagattagataaaagtaaagtgattaacagcgcattagagctgcttaatgaggtcggaatcgaaggtttaacaacccgtaaactcgcccagaagctaggtgtagagcagcctacattgtattggcatgtaaaaaataagcgagctctgctcgacgcantggccattgagatgctggataggcacgcgactcactattgccctttagaaggggaaagctggcaagattttttacgtaataacgctaaaagtatgagatgtgctttactaagtcatcgcgatggagcaaaagtatgtttaggtacaggctttacagaacagcaatatgaanctgccgaaaatagtctggcctttttatgccaacaaggtttttcactagagcacgcactgtatgcaatgcaggctgctggtatttatactttaggttgcgtattgttggatcaagagcttcaagtcgctaaagaagaaagggaaacacctactactgatagtatgccgccattactccgacaagctctggaattaaaggatcaccaaggtgcagagccagccttcttattcggccttgaattgatcatatgcggattagaaaaacaacttaaatgtgaaagtgggtcttaa

SEQ ID NO: 754 - DNA, 627 bp, Artificial Sequence
  synthetic construct; Sulfonylurea responsive repressor
atgggatctagattagataaaagtaaagtgattaacagcgcattagagctgcttaatgaggtcggaatcgaaggtttaacaacccgtaaactcgcccagaagctaggtgtagagcagcctacattgtattggcatgtaaaaaataagcgagctctgctcgacgcattggccattgagatgctggataggcacgcgactcactattgccctttagaaggggaaagctggcaagattttttacgtaataacgctaaaagtatgagatgtgctttactaagtcatcgcgatggagcaaaagtatgtttaggtacaggctttacagaacagatgtatgaaactgccgaaaatagtatggcctttttatgccaacaaggtttttcactagagaacgcaatgtatgcaatgcaggctgctggtatttatactttaggttgcgtattgttggatcaagagcttcaagtcgctaaagaagaaagggaaacacctactactgatagtatgccgccattagtccgacaaggtctggaattaaaggatcaccaaggtgcagagccagccttcttattcggccttgaattgatcatatgcggattagaaaaacaacttaaatgtgaaagtgggtcttaa

SEQ ID NO: 755 - DNA, 627 bp, Artificial Sequence; identical to SEQ ID NO: 652
  synthetic construct; Sulfonylurea responsive repressor

SEQ ID NO: 756 - DNA, 627 bp, Artificial Sequence
  synthetic construct; Sulfonylurea responsive repressor
atgggatctagattagataaaagtaaagtgattaacagcgcattagagctgcttaatgaggtcggaatcgaaggtttaacaacccgtaaactcgcccagaagctaggtgtagagcagcctacattgtattggcatgtaaaaaataagcgagctctgctcgacgcattggccattgagatgctggataggcacgcgactcactattgccctttagaaggggaaagctggcaagattttttacgtaataacgctaaaagtatgagatgtgctttactaagtcatcgcgatggagcaaaagtatgtttaggtacaggctttacagaaaagcaatatgaaactgccgaaaatagtatggcctttttatgccaacaaggtttttcactagagcacgcaatgtatgcaatgcaggccgctggtatttatactttaggttgcgtattgttggatcaagagcttcaagtcgctaaagaagaaagggaaacacctactactgatagtatgccgccattagtccgacaagctctggaattaaaggatcaccaaggtgcagagccagccttcttattcggccttgaattgatcatatgcggattagaaaaacaacttaaatgtgaaagtgggtcttaa

SEQ ID NO: 757 - DNA, 627 bp, Artificial Sequence
  synthetic construct; Sulfonylurea responsive repressor
atgggatctagattagataaaagtaaagtgattaacagcgcattagagctgcttaatgaggtcggaatcgaaggtttaacaacccgtaaactcgcccagaagctaggtgtagagcagcctacattgtattggcatgtaaaaaataagcgagctctgctcgacgcaatggccattgagatgctggataggcacgcgactcacttgtgccctttagaaggggaaagctggcaagattttttacgtaataacgctaaaagtatgagatgtgctttactaagtcatcgcgatggagcaaaagtatgtttaggtacaggctttacagaacagatgtatgaaactgccgaaaatagtctggcctttttatgccaacaaggtttttcactagagaacgcactgtatgcaatgcaggctgctggtatttatactttaggttgcgtattgttggatcaagagcttcaagtcgctaaagaagaaagggaaacacctactactgatagtatgccgccattagtccgacaagttctggaattaaaggatcaccaaggtgcagagccagccttcttattcggccttgaattgatcatatgcggattagaaaaacaacttaaatgtgaaagtgggtcttaa

SEQ ID NO: 758 - DNA, 627 bp, Artificial Sequence
  synthetic construct; Sulfonylurea responsive repressor
  misc_feature (325)..(325): n is a, c, g, or t
atgggatctagattagataaaagtaaagtgattaacagcgcattagagctgcttaatgaggtcggaatcgaaggtttaacaacccgtaaactcgcccagaagctaggtgtagagcagcctacattgtattggcatgtaaaaaataagcgagctctgctcgacgcattggccattgagatgctggataggcacgcgactcactattgccctttagaaggggaaagctggcaagattttttacgtaataacgctaaaagtatgagatgtgctttactaagtcatcgcgatggagcaaaagtatgtttaggtacaggctttacagaanagcaatatgaagctgccgaaaatagtctggcctttttatgccaacaaggtttttcactagagcacgcactgtatgcaatgcaggctgttggtatttatactttaggttgcgtattgttggatcaagagcttcaagtcgctaaagaagaaagggaaacacctactactgatagtatgccgccattagtccgacaagctctggaattaaaggatcaccaaggtgcagagccagccttcttattcggccttgaattgatcatatgcggattagaaaaacaacttaaatgtgaaagtgggtcttaa

SEQ ID NO: 759 - DNA, 627 bp, Artificial Sequence
  synthetic construct; Sulfonylurea responsive repressor
atgggatctagattagataaaagtaaagtgattaacagcgcattagagctgcttaatgaggtcggaatcgaaggtttaacaacccgtaaactcgcccagaagctaggtgtagagcagcctacattgtattggcatgtaaaaaataagcgagctctgctcgacgcaatggccattgagatgctggataggcacgcgactcactattgccctttagaaggggaaagctggcaagattttttacgtaataacgctaaaagtatgagatgtgctttactaagtcatcgcgatggagcaaaagtatgtttaggtacaggctttacagaacagcaatatgaaagtgccgaaaatagtctggcctttttatgccaacaaggtttttcactagagcacgcaatgtatgcaatgcaggctgctggtatttttactttaggttgcgtattgttggatcaagagcttcaagtcgctaaagaagaaagggaaacacctactactgatagtatgccgccattagtccgacaagctctggaattaaaggatcaccaaggtgcagagccagccttcttattcggccttgaattgatcatatgcggattagaaaaacaacttaaatgtgaaagtgggtcttaa

SEQ ID NO: 760 - DNA, 627 bp, Artificial Sequence
  synthetic construct; Sulfonylurea responsive repressor
atgggatctagattagataaaagtaaagtgattaacagcgcattagagctgcttaatgaggtcggaatcgaaggtttaacaacccgtaaactcgcccagaagctaggtgtagagcagcctacattgtattggcatgtaaaaaataagcgagctctgctcgacgcattggccattgagatgctggataggcacgcgacacactattgccctttagaaggggaaagctggcaagattttttacgtaataacgctaaaagtatgagatgtgctttactaagtcatcgcgatggagcaaaagtatgtttaggaacaggctttacagaacagatgtatgaaactgccgaaaatagtctggcctttttatgccaacaaggtttttcactagagcacgcaatgtatgcaatgcaggctgctggtatttttactttaggttgcgtattgttggatcaagagcttcaagtcgctaaagaagaaagggaaacacctactactgatagtatgccgccattagtccgacaagttctggaattaaaggatcaccaaggtgcagagccagccttcttattcggccttgaattgatcatatgcggattagaaaaacaacttaaatgtgaaagtgggtcttaa

SEQ ID NO: 761 - DNA, 627 bp, Artificial Sequence
  synthetic construct; Sulfonylurea responsive repressor
atgggatctagattagataaaagtaaagtgattaacagcgcattagagctgcttaatgaggtcggaatcgaaggtttaacaacccgtaaactcgcccagaagctaggtgtagagcagcctacattgtattggcatgtaaaaaataagcgagctctgctcgacgcattggccattgagatgctggataggcacgcgactcactattgccctttagaaggggaaagctggcaagattttttacgtaataacgctaaaagtatgagatgtgctttactaagtcatcgcgatggagcaaaagtatgtttaggtacaggctttacagaacagatgtatgaagctgccgaaaatagtctggcctttttatgccaacaaggtttttcactagagcacgcaatgtatgcaatgcaggctgttggtatttatactttaggttgcgtattgttggatcaagagcttcaagtcgctaaagaagaaagggaaacacctactactgatagtatgccgccattagtccgacaaggtctggaattaaaggatcaccaaggtgcagagccagccttcttattcggccttgaattgatcatatgcggattagaaaaacaacttaaatgtgaaagtgggtcttaa

SEQ ID NO: 762 - DNA, 627 bp, Artificial Sequence
  synthetic construct; Sulfonylurea responsive repressor
  misc_feature (166)..(166): n is a, c, g, or t
  misc_feature (203)..(204): n is a, c, g, or t
  misc_feature (329)..(330): n is a, c, g, or t
  misc_feature (388)..(388): n is a, c, g, or t
  misc_feature (415)..(415): n is a, c, g, or t
  misc_feature (422)..(422): n is a, c, g, or t
atgggatctagattagataaaagtaaagtgattaacagcgcattagagctgcttaatgaggtcggaatcgaaggtttaacaacccgtaaactcgcccagaagctaggtgtagagcagcctacattgtattggcatgtaaaaaataagcgagctctgctcgacgcantggccattgagatgctggataggcacgcgactcactnntgccctttagaaggggaaagctggcaagattttttacgtaataacgctaaaagtatgagatgtgctttactaagtcatcgcgatggagcaaaagtatgtttaggtacaggctttacagaacagcnntatgaaactgccgaaaatagtctggcctttttatgccaacaaggtttttcactagagnacgcaatgtatgcaatgcaggctgctngtatttntactttaggttgcgtattgttggatcaagagcttcaagtcgctaaagaagaaagggaaacacctactactgatagtatgccgccattagtccgacaagctctggaattaaaggatcaccaaggtgcagagccagccttcttattcggccttgaattgatcatatgcggattagaaaaacaacttaaatgtgaaagtgggtcttaa

SEQ ID NO: 763 - DNA, 627 bp, Artificial Sequence
  synthetic construct; Sulfonylurea responsive repressor
  misc_feature (511)..(511): n is a, c, g, or t
atgggatctagattagataaaagtaaagtgattaacagcgcattagagctgcttaatgaggtcggaatcgaaggtttaacaacccgtaaactcgcccagaagctaggtgtagagcagcctacattgtattggcatgtaaaaaataagcgagctctgctcgacgcaatggccattgagatgctggataggcacgcgactcactattgccctttagaaggggaaagctggcaagattttttacgtaataacgctaaaagtatgagatgtgctttactaagtcatcgcgatggagcaaaagtatgtttaggtacaggctttacagaacagcaatatgaaagtgccgaaaatagtctggcctttttatgccaacaaggtttttcactagagaacgcaatgtatgcaatgcaggctgctggtatttatactttaggttgcgtattgttggatcaagagcttcaagtcgctaaagaagaaagggaaacacctactactgatagtatgccgccattantccgacaagctctggaattaaaggatcaccaaggtgcagagccagccttcttattcggccttgaattgatcatatgcggattagaaaaacaacttaaatgtgaaagtgggtcttaa

SEQ ID NO: 764 - DNA, 627 bp, Artificial Sequence
  synthetic construct; Sulfonylurea responsive repressor
atgggatctagattagataaaagtaaagtgattaacagcgcattagagctgcttaatgaggtcggaatcgaaggtttaacaacccgtaaactcgcccagaagctaggtgtagagcagcctacattgtattggcatgtaaaaaataagcgagctctgctcgacgcaatggccattgagatgctggataggcacgcgactcacatctgccctttagaaggggaaagctggcaagattttttacgtaataacgctaaaagtatgagatgtgctttactaagtcatcgcgatggagcaaaagtatgtttaggtacaggctttacagaacagcaatatgaaactgccgaaaatagtctggcctttttatgccaacaaggtttttcactagagcacgcaatgtatgcaatgcaggctgctggtatttatactttaggttgcgtattgttggatcaagagcttcaagtcgctaaagaagaaagggaaacacctactactgatagtatgccgccattagtccgacaagttctggaattaaaggatcaccaaggtgcagagccagccttcttattcggccttgaattgatcatatgcggattagaaaaacaacttaaatgtgaaagtgggtcttaa

SEQ ID NO: 765 - DNA, 627 bp, Artificial Sequence
  synthetic construct; Sulfonylurea responsive repressor
  misc_feature (388)..(388): n is a, c, g, or t
atgggatctagattagataaaagtaaagtgattaacagcgcattagagctgcttaatgaggtcggaatcgaaggtttaacaacccgtaaactcgcccagaagctaggtgtagagcagcctacattgtattggcatgtaaaaaataagcgagctctgctcgacgcaatggccattgagatgctggataggcacgcgactcacatgtgccctttagaaggggaaagctggcaagattttttacgtaataacgctaaaagtatgagatgtgctttactaagtcatcgcgatggagcaaaagtatgtttaggtacaggctttacagaacagcaatatgaaagtgccgaaaatagtatggcctttttatgccaacaaggtttttcactagagnacgcaatgtatgcaatgcaggctgttggtatttttactttaggttgcgtattgttggatcaagagcttcaagtcgctaaagaagaaagggaaacacctactactgatagtatgccgccattagtccgacaaggtctggaattaaaggatcaccaaggtgcagagccagccttcttattcggccttgaattgatcatatgcggattagaaaaacaacttaaatgtgaaagtgggtcttaa

SEQ ID NO: 766 - DNA, 627 bp, Artificial Sequence
  synthetic construct; Sulfonylurea responsive repressor
atgggatctagattagataaaagtaaagtgattaacagcgcattagagctgcttaatgaggtcggaatcgaaggtttaacaacccgtaaactcgcccagaagctaggtgtagagcagcctacattgtattggcatgtaaaaaataagcgagctctgctcgacgcattggccattgagatgctggataggcacgcgactcactattgccctttagaaggggaaagctggcaagattttttacgtaataacgctaaaagtatgagatgtgctttactaagtcatcgcgatggagcaaaagtatgtttaggtacaggctttacagaaaagcaatatgaaagtgccgaaaatagtatggcctttttatgccaacaaggtttttcactagagcacgcactgtatgcaatgcaggctgttggtatttatactttaggttgcgtattgttggatcaagagcttcaagtcgctaaagaagaaagggaaacacctactactgatagtatgccgccattagtccgacaaggtctggaattaaaggatcaccaaggtgcagagccagccttcttattcggccttgaattgatcatatgcggattagaaaaacaacttaaatgtgaaagtgggtcttaa

SEQ ID NO: 767 - DNA, 627 bp, Artificial Sequence
  synthetic construct; Sulfonylurea responsive repressor
atgggatctagattagataaaagtaaagtgattaacagcgcattagagctgcttaatgaggtcggaatcgaaggtttaacaacccgtaaactcgcccagaagctaggtgtagagcagcctacattgtattggcatgtaaaaaataagcgagctctgctcgacgcaatggccattgagatgctggataggcacgcgactcactattgccctttagaaggggaaagctggcaagattttttacgtaataacgctaaaagtatgagatgtgctttactaagtcatcgcgatggagcaaaagtatgtttaggtacaggctttacagaacagcaatatgaaggtgccgaaaatagtctggcctttttatgccaacaaggtttttcactagagcacgcaatgtatgcaatgcaggctgttggtatttttactttaggttgcgtattgttggatcaagagcttcaagtcgctaaagaagaaagggaaacacctactactgatagtatgccgccattagtccgacaaggtctggaattaaaggatcaccaaggtgcagagccagccttcttattcggccttgaattgatcatatgcggattagaaaaacaacttaaatgtgaaagtgggtcttaa

SEQ ID NO: 768 - DNA, 627 bp, Artificial Sequence
  synthetic construct; Sulfonylurea responsive repressor
atgggatctagattagataaaagtaaagtgattaacagcgcattagagctgcttaatgaggtcggaatcgaaggtttaacaacccgtaaactcgcccagaagctaggtgtagagcagcctacattgtattggcatgtaaaaaataagcgagctctgctcgacgcaatggccattgagatgctggataggcacgcgactcactattgccctttagaaggggaaagctggcaagattttttacgtaataacgctaaaagtatgagatgtgctttactaagtcatcgcgatggagcaaaagtatgtttaggtacaggctttacagaacagcaatatgaaagtgccgaaaatagtctggcctttttatgccaacaaggtttttcactagagaacgcaatgtatgcaatgcaggctgttggtatttttactttaggttgcgtattgttggatcaagagcttcaagtcgctaaagaagaaagggaaacacctactactgatagtatgccgccattactccgacaagttctggaattaaaggatcaccaaggtgcagagccagccttcttattcggccttgaattgatcatatgcggattagaaaaacaacttaaatgtgaaagtgggtcttaa

SEQ ID NO: 769 - DNA, 627 bp, Artificial Sequence
  synthetic construct; Sulfonylurea responsive repressor
atgggatctagattagataaaagtaaagtgattaacagcgcattagagctgcttaatgaggtcggaatcgaaggtttaacaacccgtaaactcgcccagaagctaggtgtagagcagcctacattgtattggcatgtaaaaaataagcgagctctgctcgacgcaatggccattgagatgctggataggcacgcgactcacatctgccctttagaaggggaaagctggcaagattttttacgtaataacgctaaaagtatgagatgtgctttactaagtcatcgcgatggagcaaaagtatgtttaggtacaggctttacagaacagcaatatgaaactgccgaaaatagtctggcctttttatgccaacaaggtttttcactagagaacgcaatgtatgcaatgcaggctgttggtatttatactttaggttgcgtattgttggatcaagagcttcaagtcgctaaagaagaaagggaaacacctactactgatagtatgccgccattagtccgacaagctctggaattaaaggatcaccaaggtgcagagccagccttcttattcggccttgaattgatcatatgcggattagaaaaacaacttaaatgtgaaagtgggtcttaa

SEQ ID NO: 770 - DNA, 627 bp, Artificial Sequence
  synthetic construct; Sulfonylurea responsive repressor
atgggatctagattagataaaagtaaagtgattaacagcgcattagagctgcttaatgaggtcggaatcgaaggtttaacaacccgtaaactcgcccagaagctaggtgtagagcagcctacattgtattggcatgtaaaaaataagcgagctctgctcgacgcaatggccattgagatgctggataggcacgcgactcactattgccctttagaaggggaaagctggcaagattttttacgtaataacgctaaaagtatgagatgtgctttactaagtcaacgcgatggagcaaaagtatgtttaggtacaggctttacagaacagcaatatgaagctgccgaaaatagtctggcctttttatgccaacaaggtttttcactagagaacgcaatgtatgcaatgcaggctgttggtatttttactttaggttgcgtattgttggatcaagagcttcaagtcgctaaagaagaaagggaaacacctactactgatagtatgccgccattagtccgacaagctctggaattaaaggatcaccaaggtgcagagccagccttcttattcggccttgaattgatcatatgcggattagaaaaacaacttaaatgtgaaagtgggtcttaa

SEQ ID NO: 771 - DNA, 627 bp, Artificial Sequence
  synthetic construct; Sulfonylurea responsive repressor
atgggatctagattagataaaagtaaagtgattaacagcgcattagagctgcttaatgaggtcggaatcgaaggtttaacaacccgtaaactcgcccagaagctaggtgtagagcagcctacattgtattggcatgtaaaaaataagcgagctctgctcgacgcaatggccattgagatgctggataggcacgcgactcactattgccctttagaaggggaaagctggcaagattttttacgtaataacgctaaaagtatgagatgtgctttactaagtcatcgcgatggagcaaaagtatgtttaggtacaggctttacagaacagcaatatgaaggggccgaaaatagtatggcctttttatgccaacaaggtttttcactagagaacgcactgtatgcaatgcaggctgttggtatttatactttaggttgcgtattgttggatcaagagcttcaagtcgctaaagaagaaagggaaacacctactactgatagtatgccgccattagtccgacaagttctggaattaaaggatcaccaaggtgcagagccagccttcttattcggccttgaattgatcatatgcggattagaaaaacaacttaaatgtgaaagtgggtcttaa

SEQ ID NO: 772 - DNA, 627 bp, Artificial Sequence
  synthetic construct; Sulfonylurea responsive repressor
atgggatctagattagataaaagtaaagtgattaacagcgcattagagctgcttaatgaggtcggaatcgaaggtttaacaacccgtaaactcgcccagaagctaggtgtagagcagcctacattgtattggcatgtaaaaaataagcgagctctgctcgacgcaatggccattgagatgctggataggcacgcgactcactattgccctttagaaggggaaagctggcaagattttttacgtaataacgctaaaagtatgagatgtgctttactaagtcatcgcgatggagcaaaagtatgtttaggtacaggctttacagaacagcaatatgaaggtgccgaaaatagtatggcctttttatgccaacaaggtttttcactagagaacgcaatgtatgcaatgcaggctgctggtatttatactttaggttgcgtattgttggatcaagagcttcaagtcgctaaagaagaaagggaaacacctactactgatagtatgccgccattagtccgacaagctctggaattaaaggatcaccaaggtgcagagccagccttcttattcggccttgaattgatcatatgcggattagaaaaacaacttaaatgtgaaagtgggtcttaa

SEQ ID NO: 773 - DNA, 627 bp, Artificial Sequence
  synthetic construct; Sulfonylurea responsive repressor
  misc_feature (166)..(166): n is a, c, g, or t
  misc_feature (328)..(330): n is a, c, g, or t
  misc_feature (394)..(394): n is a, c, g, or t
  misc_feature (413)..(413): n is a, c, g, or t
atgggatctagattagataaaagtaaagtgattaacagcgcattagagctgcttaatgaggtcggaatcgaaggtttaacaacccgtaaactcgcccagaagctaggtgtagagcagcctacattgtattggcatgtaaaaaataagcgagctctgctcgacgcantggccattgagatgctggataggcacgcgactcactattgccctttagaaggggaaagctggcaagattttttacgtaataacgctaaaagtatgagatgtgctttactaagtcatcgcgatggagcaaaagtatgtttaggtacaggctttacagaacagnnntatgaagctgccgaaaatagtatggcctttttatgccaacaaggtttttcactagagcacgcantgtatgcaatgcaggctgntggtatttatactttaggttgcgtattgttggatcaagagcttcaagtcgctaaagaagaaagggaaacacctactactgatagtatgccgccattagtccgacaagttctggaattaaaggatcaccaaggtgcagagccagccttcttattcggccttgaattgatcatatgcggattagaaaaacaacttaaatgtgaaagtgggtcttaa

SEQ ID NO: 774 - DNA, 627 bp, Artificial Sequence
  synthetic construct; Sulfonylurea responsive repressor
  misc_feature (157)..(157): n is a, c, g, or t
  misc_feature (159)..(159): n is a, c, g, or t
  misc_feature (165)..(166): n is a, c, g, or t
  misc_feature (187)..(187): n is a, c, g, or t
  misc_feature (189)..(189): n is a, c, g, or t
  misc_feature (195)..(195): n is a, c, g, or t
  misc_feature (238)..(238): n is a, c, g, or t
  misc_feature (240)..(240): n is a, c, g, or t
  misc_feature (257)..(257): n is a, c, g, or t
  misc_feature (267)..(267): n is a, c, g, or t
  misc_feature (291)..(291): n is a, c, g, or t
  misc_feature (297)..(297): n is a, c, g, or t
  misc_feature (304)..(304): n is a, c, g, or t
  misc_feature (318)..(318): n is a, c, g, or t
  misc_feature (328)..(329): n is a, c, g, or t
  misc_feature (363)..(363): n is a, c, g, or t
  misc_feature (388)..(388): n is a, c, g, or t
  misc_feature (394)..(394): n is a, c, g, or t
  misc_feature (414)..(414): n is a, c, g, or t
  misc_feature (420)..(420): n is a, c, g, or t
  misc_feature (423)..(423): n is a, c, g, or t
  misc_feature (442)..(442): n is a, c, g, or t
  misc_feature (456)..(456): n is a, c, g, or t
  misc_feature (504)..(504): n is a, c, g, or t
  misc_feature (511)..(511): n is a, c, g, or t
  misc_feature (521)..(521): n is a, c, g, or t
  misc_feature (546)..(546): n is a, c, g, or t
  misc_feature (573)..(573): n is a, c, g, or t
  misc_feature (594)..(594): n is a, c, g, or t
atgggatctagattagataaaagtaaagtgattaacagcgcattagagctgcttaatgaggtcggaatcgaaggtttaacaacccgtaaactcgcccagaagctaggtgtagagcagcctacattgtattggcatgtaaaaaataagcgagctctgntngacgcnntggccattgagatgctggatngncacgcnactcactattgccctttagaaggggaaagctggcaagattttntncgtaataacgctaaaantatgagatgngctttactaagtcatcgcgatggngcaaangtatgtntaggtacaggcttnacagaacagnngtatgaaactgccgaaaatagtctggcctttttntgccaacaaggtttttcactagagnacgcantgtatgcaatgcaggctgtnggtatntanactttaggttgcgtattgntggatcaagagctncaagtcgctaaagaagaaagggaaacacctactactgatagtatgccnccattantccgacaagntctggaattaaaggatcaccaaggngcagagccagccttcttattcggcctngaattgatcatatgcggattngaaaaacaacttaaatgtgaaagtgggtcttaa

SEQ ID NO: 775 - DNA, 627 bp, Artificial Sequence; identical to SEQ ID NO: 761
  synthetic construct; Sulfonylurea responsive repressor

SEQ ID NO: 776 - DNA, 627 bp, Artificial Sequence
  synthetic construct; Sulfonylurea responsive repressor
atgggatctagattagataaaagtaaagtgattaacagcgcattagagctgcttaatgaggtcggaatcgaaggtttaacaacccgtaaactcgcccagaagctaggtgtagagcagcctacattgtattggcatgtaaaaaataagcgagctctgctcgacgcaatggccattgagatgctggataggcacgcgactcactattgccctttagaaggggaaagctggcaagattttttacgtaataacgctaaaagtatgagatgtgctttactaagtcatcgcgatggagcaaaagtatgtttaggtacaggctttacagaacagcaatatgaagctgccgaaaatagtatggcctttttatgccaacaaggtttttcactagagcacgcactgtatgcaatgcaggctgcttgtatttatactttaggttgcgtattgttggatcaagagcttcaagtcgctaaagaagaaagggaaacacctactactgatagtatgccgccattagtccgacaagctctggaattaaaggatcaccaaggtgcagagccagccttcttattcggccttgaattgatcatatgcggattagaaaaacaacttaaatgtgaaagtgggtcttaa

SEQ ID NO: 777 - DNA, 627 bp, Artificial Sequence; identical to SEQ ID NO: 726
  synthetic construct; Sulfonylurea responsive repressor

SEQ ID NO: 778 - DNA, 627 bp, Artificial Sequence
  synthetic construct; Sulfonylurea responsive repressor
atgggatctagattagataaaagtaaagtgattaacagcgcattagagctgcttaatgaggtcggaatcgaaggtttaacaacccgtaaactcgcccagaagctaggtgtagagcagcctacattgtattggcatgtaaaaaataagcgagctctgctcgacgcaatggccattgagatgctggataggcacgcgactcactattgccctttagaaggggaaagctggcaagattttttacgtaataacgctaaaagtatgagatgtgctttactaagtcatcgcgatggagcaaaagtatgtttaggtacaggctttacagaacagcactatgaaagtgccgaaaatagtctggcctttttatgccaacaaggtttttcactagagcacgcaatgtatgcaatgcaggctgttggtatttatactttaggttgcgtattgttggatcaagagcttcaagtcgctaaagaagaaagggaaacacctactactgatagtatgccgccattagtccgacaagctctggaattaaaggatcaccaaggtgcagagccagccttcttattcggccttgaattgatcatatgcggattagaaaaacaacttaaatgtgaaagtgggtcttaa

SEQ ID NO: 779 - DNA, 627 bp, Artificial Sequence
  synthetic construct; Sulfonylurea responsive repressor
  misc_feature (413)..(413): n is a, c, g, or t
atgggatctagattagataaaagtaaagtgattaacagcgcattagagctgcttaatgaggtcggaatcgaaggtttaacaacccgtaaactcgcccagaagctaggtgtagagcagcctacattgtattggcatgtaaaaaataagcgagctctgctcgacgcaatggccattgagatgctggataggcacgcgactcactattgccctttagaaggggaaagctggcaagattttttacgtaataacgctaaaagtatgagatgtgctttactaagtcatcgcgatggagcaaaagtatgtttaggtacaggctttacagaacagcaatatgaagctgccgaaaatagtatggcctttttatgccaacaaggtttttcactagagcacgcaatgtatgcaatgcaggctgntggtatttatactttaggttgcgtattgttggatcaagagcttcaagtcgctaaagaagaaagggaaacacctactactgatagtatgccgccattagtccgacaagctctggaattaaaggatcaccaaggtgcagagccagccttcttattcggccttgaattgatcatatgcggattagaaaaacaacttaaatgtgaaagtgggtcttaa

SEQ ID NO: 780 - DNA, 627 bp, Artificial Sequence
  synthetic construct; Sulfonylurea responsive repressor
atgggatctagattagataaaagtaaagtgattaacagcgcattagagctgcttaatgaggtcggaatcgaaggtttaacaacccgtaaactcgcccagaagctaggtgtagagcagcctacattgtattggcatgtaaaaaataagcgagctctgctcgacgcaatggccattgagatgctggataggcacgcgactcactattgccctttagaaggggaaagctggcaagattttttacgtaataacgctaaaagtatgagatgtgctttactaagtcatcgcgatggagcaaaagtatgtttaggtacaggctttacagaacagcaatatgaaactgccgaaaatagtatggcctttttatgccaacaaggtttttcactagagcacgcaatgtatgcaatgcaggctgctggtatttatactttaggttgcgtattgttggatcaagagcttcaagtcgctaaagaagaaagggaaacacctactactgatagtatgccgccattactccgacaagctctggaattaaaggatcaccaaggtgcagagccagccttcttattcggccttgaattgatcatatgcggattagaaaaacaacttaaatgtgaaagtgggtcttaa

SEQ ID NO: 781 - DNA, 627 bp, Artificial Sequence
  synthetic construct; Sulfonylurea responsive repressor
atgggatctagattagataaaagtaaagtgattaacagcgcattagagctgcttaatgaggtcggaatcgaaggtttaacaacccgtaaactcgcccagaagctaggtgtagagcagcctacattgtattggcatgtaaaaaataagcgagctctgctcgacgcaatggccattgagatgctggataggcacgcgactcacttctgccctttagaaggggaaagctggcaagattttttacgtaataacgctaaaagtatgagatgtgctttactaagtcatcgcgatggagcaaaagtatgtttaggtacaggctttacagaacagcaatatgaaactgccgaaaatagtctggcctttttatgccaacaaggtttttcactagagaacgcactgtatgcaatgcaggctgcttgtatttatactttaggttgcgtattgttggatcaagagcttcaagtcgctaaagaagaaagggaaacacctactactgatagtatgccgccattagtccgacaagctctggaattaaaggatcaccaaggtgcagagccagccttcttattcggccttgaattgatcatatgcggattagaaaaacaacttaaatgtgaaagtgggtcttaa

SEQ ID NO: 782 - DNA, 627 bp, Artificial Sequence
  synthetic construct; Sulfonylurea responsive repressor
atgggatctagattagataaaagtaaagtgattaacagcgcattagagctgcttaatgaggtcggaatcgaaggtttaacaacccgtaaactcgcccagaagctaggtgtagagcagcctacattgtattggcatgtaaaaaataagcgagctctgctcgacgcaatggccattgagatgctggataggcacgcgactcactattgccctttagaaggggaaagctggcaagattttttacgtaataacgctaaaagtatgagatgtgctttactaagtcatcgcgatggagcaaaagtatgtttaggtacaggctttacagaacagcaatatgaaagtgccgaaaatagtatggcctttttatgccaacaaggtttttcactagagaacgcaatgtatgcaatgcaggctgctggtatttatactttaggttgcgtattgttggatcaagagcttcaagtcgctaaagaagaaagggaaacacctactactgatagtatgccgccattagtccgacaaggtctggaattaaaggatcaccaaggtgcagagccagccttcttattcggccttgaattgatcatatgcggattagaaaaacaacttaaatgtgaaagtgggtcttaa

SEQ ID NO: 783 - DNA, 627 bp, Artificial Sequence
  synthetic construct; Sulfonylurea responsive repressor
atgggatctagattagataaaagtaaagtgattaacagcgcattagagctgcttaatgaggtcggaatcgaaggtttaacaacccgtaaactcgcccagaagctaggtgtagagcagcctacattgtattggcatgtaaaaaataagcgagctctgctcgacgcaatggccattgagatgctggataggcacgcgactcacatgtgccctttagaaggggaaagctggcaagattttttacgtaataacgctaaaagtatgagatgtgctttactaagtcatcgcgatggagcaaaagtatgtttaggtacaggctttacagaacagcaatatgaaagtgccgaaaatagtatggcctttttatgccaacaaggtttttcactagagcacgcaatgtatgcaatgcaggctgctggtatttatactttaggttgcgtattgttggatcaagagcttcaagtcgctaaagaagaaagggaaacacctactactgatagtatgccgccattactccgacaagctctggaattaaaggatcaccaaggtgcagagccagccttcttattcggccttgaattgatcatatgcggattagaaaaacaacttaaatgtgaaagtgggtcttaa

SEQ ID NO: 784 - DNA, 627 bp, Artificial Sequence
  synthetic construct; Sulfonylurea responsive repressor
  misc_feature (203)..(203): n is a, c, g, or t
  misc_feature (338)..(338): n is a, c, g, or t
  misc_feature (511)..(511): n is a, c, g, or t
  misc_feature (521)..(521): n is a, c, g, or t
atgggatctagattagataaaagtaaagtgattaacagcgcattagagctgcttaatgaggtcggaatcgaaggtttaacaacccgtaaactcgcccagaagctaggtgtagagcagcctacattgtattggcatgtaaaaaataagcgagctctgctcgacgcaatggccattgagatgctggataggcacgcgactcactnttgccctttagaaggggaaagctggcaagattttttacgtaataacgctaaaagtatgagatgtgctttactaagtcatcgcgatggagcaaaagtatgtttaggtacaggctttacagaacagcaatatgaaantgccgaaaatagtatggcctttttatgccaacaaggtttttcactagagaacgcaatgtatgcaatgcaggctgttggtatttatactttaggttgcgtattgttggatcaagagcttcaagtcgctaaagaagaaagggaaacacctactactgatagtatgccgccattantccgacaagntctggaattaaaggatcaccaaggtgcagagccagccttcttattcggccttgaattgatcatatgcggattagaaaaacaacttaaatgtgaaagtgggtcttaa

SEQ ID NO: 785 - DNA, 627 bp, Artificial Sequence
  synthetic construct; Sulfonylurea responsive repressor
atgggatctagattagataaaagtaaagtgattaacagcgcattagagctgcttaatgaggtcggaatcgaaggtttaacaacccgtaaactcgcccagaagctaggtgtagagcagcctacattgtattggcatgtaaaaaataagcgagctctgctcgacgcattggccattgagatgctggataggcacgcgactcactattgccctttagaaggggaaagctggcaagattttttacgtaataacgctaaaagtatgagatgtgctttactaagtcatcgcgatggagcaaaagtatgtttaggtacaggctttacagaacagcactatgaagctgccgaaaatagtatggcctttttatgccaacaaggtttttcactagagaacgcaatgtatgcaatgcaggctgttggtatttttactttaggttgcgtattgttggatcaagagcttcaagtcgctaaagaagaaagggaaacacctactactgatagtatgccgccattagtccgacaagctctggaattaaaggatcaccaaggtgcagagccagccttcttattcggccttgaattgatcatatgcggattagaaaaacaacttaaatgtgaaagtgggtcttaa

SEQ ID NO: 786 - DNA, 627 bp, Artificial Sequence
  synthetic construct; Sulfonylurea responsive repressor
atgggatctagattagataaaagtaaagtgattaacagcgcattagagctgcttaatgaggtcggaatcgaaggtttaacaacccgtaaactcgcccagaagctaggtgtagagcagcctacattgtattggcatgtaaaaaataagcgagctctgctcgacgcattggccattgagatgctggataggcacgcgactcactattgccctttagaaggggaaagctggcaagattttttacgtaataacgctaaaagtatgagatgtgctttactaagtcatcgcgatggagcaaaagtatgtttaggtacaggctttacagaacagatgtatgaaagtgccgaaaatagtatggcctttttatgccaacaaggtttttcactagagcacgcaatgtatgcaatgcaggctgctggtatttatactttaggttgcgtattgttggatcaagagcttcaagtcgctaaagaagaaagggaaacacctactactgatagtatgccgccattactccgacaagctctggaattaaaggatcaccaaggtgcagagccagccttcttattcggccttgaattgatcatatgcggattagaaaaacaacttaaatgtgaaagtgggtcttaa

SEQ ID NO: 787 - DNA, 627 bp, Artificial Sequence
  synthetic construct; Sulfonylurea responsive repressor
  misc_feature (328)..(330): n is a, c, g, or t
  misc_feature (338)..(338): n is a, c, g, or t
  misc_feature (422)..(422): n is a, c, g, or t
  misc_feature (512)..(513): n is a, c, g, or t
atgggatctagattagataaaagtaaagtgattaacagcgcattagagctgcttaatgaggtcggaatcgaaggtttaacaacccgtaaactcgcccagaagctaggtgtagagcagcctacattgtattggcatgtaaaaaataagcgagctctgctcgacgcaatggccattgagatgctggataggcacgcgactcactattgccctttagaaggggaaagctggcaagattttttacgtaataacgctaaaagtatgagatgtgctttactaagtcatcgcgatggagcaaaagtatgtttaggtacaggctttacagaacagnnntatgaaantgccgaaaatagtctggcctttttatgccaacaaggtttttcactagagcacgcactgtatgcaatgcaggctgcttgtatttntactttaggttgcgtattgttggatcaagagcttcaagtcgctaaagaagaaagggaaacacctactactgatagtatgccgccattagnncgacaaggtctggaattaaaggatcaccaaggtgcagagccagccttcttattcggccttgaattgatcatatgcggattagaaaaacaacttaaatgtgaaagtgggtcttaa

SEQ ID NO: 788 - DNA, 627 bp, Artificial Sequence
  synthetic construct; Sulfonylurea responsive repressor
atgggatctagattagataaaagtaaagtgattaacagcgcattagagctgcttaatgaggtcggaatcgaaggtttaacaacccgtaaactcgcccagaagctaggtgtagagcagcctacattgtattggcatgtaaaaaataagcgagctctgctcgacgcaatggccattgagatgctggataggcacgcgactcactattgccctttagaaggggaaagctggcaagattttttacgtaataacgctaaaagtatgagatgtgctttactaagtcatcgcgatggagcaaaagtatgtttaggtacaggctttacagaacagcaatatgaaagtgccgaaaatagtatggcctttttatgccaacaaggtttttcactagagcacgcaatgtatgcaatgcaggctgttggtatttatactttaggttgcgtattgttggatcaagagcttcaagtcgctaaagaagaaagggaaacacctactactgatagtatgccgccattactccgacaagctctggaattaaaggatcaccaaggtgcagagccagccttcttattcggccttgaattgatcatatgcggattagaaaaacaacttaaatgtgaaagtgggtcttaa

SEQ ID NO: 789 - DNA, 627 bp, Artificial Sequence
  synthetic construct; Sulfonylurea responsive repressor
atgggatctagattagataaaagtaaagtgattaacagcgcattagagctgcttaatgaggtcggaatcgaaggtttaacaacccgtaaactcgcccagaagctaggtgtagagcagcctacattgtattggcatgtaaaaaataagcgagctctgctcgacgcaatggccattgagatgctggataggcacgcgactcacgtctgccctttagaaggggaaagctggcaagattttttacgtaataacgctaaaagtatgagatgtgctttactaagtcatcgcgatggagcaaaagtatgtttaggtacaggctttacagaacagcactatgaaagtgccgaaaatagtctggcctttttatgccaacaaggtttttcactagagcacgcactgtatgcaatgcaggctgttggtatttatactttaggttgcgtattgttggatcaagagcttcaagtcgctaaagaagaaagggaaacacctactactgatagtatgccgccattagtccgacaagctctggaattaaaggatcaccaaggtgcagagccagccttcttattcggccttgaattgatcatatgcggattagaaaaacaacttaaatgtgaaagtgggtcttaa

SEQ ID NO: 790 - DNA, 627 bp, Artificial Sequence
  synthetic construct; Sulfonylurea responsive repressor
atgggatctagattagataaaagtaaagtgattaacagcgcattagagctgcttaatgaggtcggaatcgaaggtttaacaacccgtaaactcgcccagaagctaggtgtagagcagcctacattgtattggcatgtaaaaaataagcgagctctgctcgacgcaatggccattgagatgctggataggcacgcgactcacttctgccctttagaaggggaaagctggcaagattttttacgtaataacgctaaaagtatgagatgtgctttactaagtcatcgcgatggagcaaaagtatgtttaggtacaggctttacagaacagcaatatgaaactgccgaaaatagtctggcctttttatgccaacaaggtttttcactagagaacgcaatgtatgcaatgcaggctgttggtatttatactttaggttgcgtattgttggatcaagagcttcaagtcgctaaagaagaaagggaaacacctactactgatagtatgccgccattagtccgacaaggtctggaattaaaggatcaccaaggtgcagagccagccttcttattcggccttgaattgatcatatgcggattagaaaaacaacttaaatgtgaaagtgggtcttaa

SEQ ID NO: 791 - DNA, 627 bp, Artificial Sequence
  synthetic construct; Sulfonylurea responsive repressor
atgggatctagattagataaaagtaaagtgattaacagcgcattagagctgcttaatgaggtcggaatcgaaggtttaacaacccgtaaactcgcccagaagctaggtgtagagcagcctacattgtattggcatgtaaaaaataagcgagctctgctcgacgcaatggccattgagatgctggataggcacgcgactcactattgccctttagaaggggaaagctggcaagattttttacgtaataacgctaaaagtatgagatgtgctttactaagtcatcgcgatggagcaaaagtatgtttaggtacaggctttacagaacagcaatatgaaactgccgaaaatagtctggcctttttatgccaacaaggtttttcactagagaacgcactgtatgcaatgcaggctgcttgtatttatactttaggttgcgtattgttggatcaagagcttcaagtcgctaaagaagaaagggaaacacctactactgatagtatgccgccattagtccgacaagttctggaattaaaggatcaccaaggtgcagagccagccttcttattcggccttgaattgatcatatgcggattagaaaaacaacttaaatgtgaaagtgggtcttaa

SEQ ID NO: 792 - DNA, 627 bp, Artificial Sequence
  synthetic construct; Sulfonylurea responsive repressor
atgggatctagattagataaargkrragkgattaacagcgcattagagctgcttaatgaggtcggaatcgaaggtttaacaacccgtaaactcgcccagaagctaggtgtagagcagcctacattgtattggcatgtaaaaaataagcgagctctgctcgacgcaatggccattgagatgctggataggcacgcgactcactattgccctttagaaggggaaagctggcaagattttttacgtaataacgctaaaagtatgagatgtgctttactaagtcatcgcgatggagcaaaagtatgtttaggtacaggctttacagaacagcaatatgatactgccgaaaatagtctggcctttttatgccaacaaggtttttcactagagaacgcactgtatgcaatgcaggctgttggtatttatactttaggttgcgtattgttggatcaagagcttcaagtcgctaaagaagaaagggaaacacctactactgatagtatgccgccattagtccgacaagttctggaattaaaggatcaccaaggtgcagagccagtcttcttattcggccttgaattgatcatatgcggattagaaaaacaacttaaatgtgaaagtgggtcttaa

SEQ ID NO: 793 - DNA, 627 bp, Artificial Sequence
  synthetic construct; Sulfonylurea responsive repressor
atgggatctagattagataaaagtaaagtgattaacagcgcattagagctgcttaatgaggtcggaatcgaaggtttaacaacccgtaaactcgcccagaagctaggtgtagagcagcctacattgtattggcatgtaaaaaataagcgagctctgctcgacgcattggccattgagatgctggataggcacgcgactcactattgccctttagaaggggaaagctggcaagattttttacgtaataacgctttaagtatgagatgtgctttactaagtcatcgcgatggagcaaaagtatgtttaggtacaggctttacagaaaagcaatatgaaactgccgaaaatagtatggcctttttatgccaacaaggtttttcactagagcacgcaatgtatgcaatgcaggctgctggtatttatactttaggttgcgtattgttggatcaagagcttcaagtcgctaaagaagaaagggaaacacctactactgatagtatgccgccattagtccgacaagctctggaattaaaggatcaccaaggtgcagagccagccttcttattcggccttgaattgatcatatgcggattagaaaaacaacttaaatgtgaaagtgggtcttaa

SEQ ID NO: 794 - DNA, 627 bp, Artificial Sequence
  synthetic construct; Sulfonylurea responsive repressor
atgggatctagattagataaaagtaaagtgattaacagcgcattagagctgcttaatgaggtcggaatcgaaggtttaacaacccgtaaactcgcccagaagctaggtgtagagcagcctacattgtattggcatgtaaaaaataagcgagctctgctcgacgcaatggccattgagatgctggataggcacgcgactcactattgccctttagaaggggaaagctggcaagattttttacgtaataacgctaaaagtatgagatgtgctttactaagtcatcgcgatggagcaaaagtatgtttaggtacaggctttacagaacagcaatatgaaactgccgaaaatagtctggcctttttatgccaacaaggtttttcactagagaacgcaatgtatgcaatgcaggctgttggtatttatactttaggttgcgtattgttggatcaagagcttcaagtcgctaaagaagaaagggaaacacctactactgatagtatgccgccattactccgacaagttctggaattaaaggatcaccaaggtgcagagccagccttcttattcggccttgaattgatcatatgcggattagaaaaacaacttaaatgtgaaagtgggtcttaa

SEQ ID NO: 795 - DNA, 627 bp, Artificial Sequence
  synthetic construct; Sulfonylurea responsive repressor
atgggatctagattagatwaaagkrragtgattaacagcgcattagagctgcttaatgaggtcggaatcgaaggtttaacaacccgtaaactcgcccagaagctaggtgtagagcagcctacattgtattggcatgtaaaaaataagcgagctctgctcgacgcaatggccattgagatgctggataggcacgcgactcactattgccctttagaaggggaaagctggcaagattttttacgtaataacgctaaaagtatgagatgtgctttactaagtcatcgcgatggagcaaaagtatgtttaggtacaggctttacagaacagcaatatgaagctgccgaaaatagtatggcctttttatgccaacaaggtttttcactagagcacgcaatgtatgcaatgcaggctgcttgtatttatactttaggttgcgtattgttggatcaagagcttcaagtcgctaaagaagaaagggaaacacctactactgatagtatgccgccattagtccgacaagctctggaattaaaggatcaccaaggtgcagagccagccttcttattcggccttgaattgatcatatgcggattagaaaaacaacttaaatgtgaaagtgggtcttaa

SEQ ID NO: 796 - DNA, 627 bp, Artificial Sequence
  synthetic construct; Sulfonylurea responsive repressor
  misc_feature (166)..(166): n is a, c, g, or t
  misc_feature (330)..(330): n is a, c, g, or t
  misc_feature (511)..(511): n is a, c, g, or t
atgggatctagattagataaaagtaaagtgattaacagcgcattagagctgcttaatgaggtcggaatcgaaggtttaacaacccgtaaactcgcccagaagctaggtgtagagcagcctacattgtattggcatgtaaaaaataagcgagctctgctcgacgcantggccattgagatgctggataggcacgcgactcactattgccctttagaaggggaaagctggcaagattttttacgtaataacgctaaaagtatgagatgtgctttactaagtcatcgcgatggagcaaaagtatgtttaggtacaggctttacagaacagcantatgaaattgccgaaaatagtctggcctttttatgccaacaaggtttttcactagagcacgcaatgtatgcaatgcaggctgctggtatttatactttaggttgcgtattgttggatcaagagcttcaagtcgctaaagaagaaagggaaacacctactactgatagtatgccgccattantccgacaagctctggaattaaaggatcaccaaggtgcagagccagccttcttattcggccttgaattgatcatatgcggattagaaaaacaacttaaatgtgaaagtgggtcttaa

SEQ ID NO: 797 - DNA, 627 bp, Artificial Sequence
  synthetic construct; Sulfonylurea responsive repressor
atgggatctagattagataaaagtaaagtgattaacagcgcattagagctgcttaatgaggtcggaatcgaaggtttaacaacccgtaaactcgcccagaagctaggtgtagagcagcctacattgtattggcatgtaaaaaataagcgagctctgctcgacgcattggccattgagatgctggataggcacgcgactcactattgccctttagaaggggaaagctggcaagattttttacgtaataacgctaaaagtatgagatgtgctttactaagtcatcgcgatggagcaaaagtatgtttaggtacaggctttacagaaaagcaatatgaagctgccgaaaatagtctggcctttttatgccaacaaggtttttcactagagcacgcactgtatgcaatgcaggctgttggtatttatactttaggttgcgtattgttggatcaagagcttcaagtcgctaaagaagaaagggaaacacctactactgatagtatgccgccattagtccgacaagttctggaattaaaggatcaccaaggtgcagagccagccttcttattcggccttgaattgatcatatgcggattagaaaaacaacttaaatgtgaaagtgggtcttaa

SEQ ID NO: 798 - DNA, 627 bp, Artificial Sequence
  synthetic construct; Sulfonylurea responsive repressor
atgggatctagattagataaaagkrragkgattaacagcgcattagagctgcttawtgaggtcggaatcgaaggtttaacaacccgtaaactcgcccagaagctaggtgtagagcagcctacattgtattggcatgtaaaaaataagcgagctctgctcgacgcaatggccattgagatgctggataggcacgcgactcactattgccctttagaaggggaaagctggcaagattttttacgtaataacgctaaaagtatgagatgtgctttactaagtcatcgcgatggagcaaaagtatgtttaggtacaggctttacagaaaagctgtatgaaagtgccgaaaatagtctggcctttttatgccaacaaggtttttcactagagaacgcaatgtatgcaatgcaggctgtttgtatttttactttaggttgcgtattgttggatcaagagcttcaagtcgctaaagaagaaagggaaacacctactactgatagtatgccgccattactccgacaaggtctggaattaaaggatcaccaaggtgcagagccagccttcttattcggccttgaattgatcatatgcggattagaaaaacaacttaaatgtgaaagtgggtcttaa

SEQ ID NO: 799 - DNA, 627 bp, Artificial Sequence
  synthetic construct; Sulfonylurea responsive repressor
atgggatctagattagataaaagtaaagtgattaacagcgcattagagctgcttaatgaggtcggaatcgaaggtttaacaacccgtaaactcgcccagaagctaggtgtagagcagcctacattgtattggcatgtaaaaaataagcgagctctgctcgacgcaatggccattgagatgctggataggcacgcgactcactattgccctttagaaggggaaagctggcaagattttttacgtaataacgctaaaagtatgagatgtgctttactaagtcatcgcgatggagcaaaagtatgtttaggtacaggctttacagaacagcaatatgaaagtgccgaaaatagtctggcctttttatgccaacaaggtttttcactagagcacgcaatgtatgcaatgcaggctgttggtatttttactttaggttgcgtattgttggatcaagagcttcaagtcgctaaagaagaaagggaaacacctactacagatagtatgccgccattactccgacaagctctggaattaaaggatcaccaaggtgcagagccagccttcttattcggccttgaattgatcatatgcggattagaaaaacaacttaaatgtgaaagtgggtcttaa

SEQ ID NO: 800 - DNA, 627 bp, Artificial Sequence
  synthetic construct; Sulfonylurea responsive repressor
atgggatctagattagataaaagtaaagtgattaacagcgcattagagctgcttaatgaggtcggaatcgaaggtttaacaacccgtaaactcgcccagaagctaggtgtagagcagcctacattgtattggcatgtaaaaaataagcgagctctgctcgacgcattggccattgagatgctggataggcacgcgactcactattgccctttagaaggggaaagctggcaagattttttacgtaataacgctaaaagtatgagatgtgctttactaagtcatcgcgatggagcaaaagtatgtttaggtacaggctttacagaacagatgtatgaaggtgccgaaaatagtatggcctttttatgccaacaaggtttttcactagagcacgcaatgtatgcaatgcaggctgctggtatttatactttaggttgcgtattgttggatcaagagcttcaagtcgctaaagaagaaagggaaacacctactactgatagtatgccgccattagtccgacaagctctggaattaaaggatcaccaaggtgcagagccagccttcttattcggccttgaattgatcatatgcggattagaaaaacaacttaaatgtgaaagtgggtcttaa

SEQ ID NO: 801 - DNA, 627 bp, Artificial Sequence
  synthetic construct; Sulfonylurea responsive repressor
  misc_feature (415)..(415): n is a, c, g, or t
atgggatctagattagataaaagtrargkgattaacagcgcattagagctgcttaatgaggtcggaatcgaaggtttaacaacccgtaaactcgcccagaagctaggtgtagagcagcctacattgtattggcatgtaaaaaataagcgagctctgctcgacgcaatggccattgagatgctggataggcacgcgactcactattgccctttagaaggggaaagctggcaagattttttacgtaataacgctaaaagtatgagatgtgctttactaagtcatcgcgatggagcaaaagtatgtttaggttcaggctttacagaacagcaatatgaaactgccgaaaatagtatggcctttttatgccaacaaggtttttcactagagaacgcaatgtatgcaatgcaggctgctngtatttttactttaggttgcgtattgttggatcaagagcttcaagtcgctaaagaagaaagggaaacacctactactgatagtatgccgccattagtccgacaagttctggaattaaaggatcaccaaggtgcagagccagccttcttattcggccttgaattgatcatatgcggattagaaaaacaacttaaatgtgaaagtgggtcytaa

SEQ ID NO: 802 - DNA, 627 bp, Artificial Sequence
  synthetic construct; Sulfonylurea responsive repressor
atgggatctagattagataaaagtaaagtgattaacagcgcattagagctgctymwtgaggwcggaatcgaaggtttaacaacccgtaaactcgcccagaagctaggtgtagagcagcctacattgtattggcatgtaaaaaataagcgagctctgctcgacgcaatggccattgagatgctggataggcacgcgactcacatctgccctttagaagaggaaagctggcaagattttttacgtaataacgctaaaagtatgagatgtgctttactaagtcatcgcgatggagcaaaagtatgtttaggtacaggctttacagaacagcaatatgaaactgccgaaaatagtatggcctttttatgtcaacaaggtttttcactagagcacgcaatgtatgcaatgcaggctgcttgtatttatactttaggttgcgtattgttggatcaagagcttcaagtcgctaaagaagaaagggaaacacctactactgatagtatgccgccattagtccgacaagttctggaattaaaggatcaccaaggtgcagagccagccttcttattcggccttgaattgatcatatgcggattagaaaaacaacttaaatgtgaaagtgggtcttaa

SEQ ID NO: 803 - DNA, 627 bp, Artificial Sequence
  synthetic construct; Sulfonylurea responsive repressor
atgggatctagattagataaaagkrargkgattaacagcgcattagagctgcttaatgaggtcggaatcgaaggtttaacaacccgtaaactcgcccagaagctaggtgtagagcagcctacattgtattggcatgtaaaaaataagcgagctctgctcgacgcaatggccattgagatgctggataggcacgcgactcacgtctgccctttagaaggggaaagctggcaagattttttacgtaataacgctaaaagtatgagatgtgctttactaagtcatcgcgatggagcaaaagtatgtttaggtacaggctttacagaacagcaatatgaaagtgccgaaaatagtctggcctttttatgccaacaaggtttttcactagagcacgcaatgtatgcaatgcaggctgctggtatttttactttaggttgcgtattgttggatcaagagcttcaagtcgctaaagaagaaagggaaacacctactactgatagtatgccgccattagtccgacaagctctggaattaaaggatcaccaaggtgcagagccagccttcttattcggccttgaattgatcatatgcggattagaaaaacaacttaaatgtgaaagtgggtcttaa

SEQ ID NO: 804 - DNA, 627 bp, Artificial Sequence
  synthetic construct; Sulfonylurea responsive repressor
atgggatctagattasmtwwaagtaaagtgattaacagcgcattagagctgcttaatgaggtcggaatcgaaggtttaacaacccgtaaactcgcccagaagctaggtgtagagcagcctacattgtattggcatgtaaaaaataagcgagctctgctcgacgcaatggccattgagatgctggataggcacgcgactcacatgtgccctttagaaggggaaagctggcaagattttttacgtaataacgctaaaagtatgagatgtgctttactaagtcatcgcgatggagcaaaagtatgtttaggtacaggctttacagaacagcactatgaaactgccgaaaatagtatggcctttttatgccaacaaggtttttcactagagaacgcaatgtatgcaatgcaggctgctggtatttatactttaggttgcgtattgttggatcaagagcttcaagtcgctaaagaagaaagggaaacacctactactgatagtatgccgccattagtccgacaagttctggaattaaaggatcaccaaggtgcagagccagccttcttattcggccttgaattgatcatatgcggattagaaaaacaacttaaatgtgaaagtgggtcttaa

SEQ ID NO: 805 - DNA, 627 bp, Artificial Sequence
  synthetic construct; Sulfonylurea responsive repressor
atgggatctagattagataaaagtarrgtgattaacagcgcattagagctgcttawtgaggtcggaatcgaaggtttaacaacccgtaaactcgcccagaagctaggtgtagagcagcctacattgtattggcatgtaaaaaataagcgagctctgctcgacgcaatggccattgagatgctggataggcacgcgactcactattgccctttagaaggggaaagctggcaagattttttacgtaataacgctaaaagtatgagatgtgctttactaagtcatcgcgatggagcaaaagtatgtttaggtacaggctttacagaacagcaatatgaagctgccgaaaatagtctggcctttttatgccaacaaggtttttcactagagaacgcactgtatgcaatgcaggctgttggtatttttactttaggttgcgtattgttggatcaagagcttcaagtcgctaaagaagaaagggaaacacctactactgatagtatgccgccattagtccgacaaggtctggaattaaaggatcaccaaggtgcagagccagccttcttattcggccttgaattgatcatatgcggattagaaaaacaacttaaatgtgaaagtgggtcytaa

SEQ ID NO: 806 - DNA, 627 bp, Artificial Sequence
  synthetic construct; Sulfonylurea responsive repressor
atgggatctagattagataaaagtaaagtgattaacagcgcattagagctgcttaatgaggtcggaatcgaaggtttaacaacccgtaaactcgcccagaagctaggtgtagagcagcctacattgtattggcatgtaaaaaataagcgagctctgctcgacgcaatggccattgagatgctggataggcacgcgactcactattgccctttagaaggggaaagctggcaagattttttacgtaataacgctaaaagtatgagatgtgctttactaagtcatcgcgatggagcaaaagtatgtttaggtacaggctttacagaacagcaatatgaaagtgccgaaaatagtctggcctttttatgccaacaaggtttttcactagagaacgcaatgtatgcaatgcaggctgctggtatttttactttaggttgcgtattgttggatcaagagcttcaagtcgctaaagaagaaagggaaacacctactactgatagtatgccgccattagtccgacaagctctggaattaaaggatcaccaaggtgcagagccagccttcttattcggccttgaattgatcatatgcggattagaaaaacaacttaaatgtgaaagtgggtcttaa

SEQ ID NO: 807 - DNA, 627 bp, Artificial Sequence
  synthetic construct; Sulfonylurea responsive repressor
atgggatctagattagataaaagtaaagtgattaacagcgcattagagctgcttaatgaggtcggaatcgaaggtttaacaacccgtaaactcgcccagaagctaggtgtagagcagcctacattgtattggcatgtaaaaaataagcgagctctgctcgacgcaatggccattgagatgctggataggcacgcgactcacttctgccctttagaaggggaaagctggcaagattttttacgtaataacgctaaaagtatgagatgtgctttactaagtcatcgcgatggagcaaaagtatgtttaggtacaggctttacagaacagcactatgaaagtgccgaaaatagtctggcctttttatgccaacaaggtttttcactagagaacgcaatgtatgcaatgcaggctgttggtatttatactttaggttgcgtattgttggatcaagagcttcaagtcgctaaagaagaaagggaaacacctactactgatagtatgccgccattagtccgacaagttctggaattaaaggatcaccaaggtgcagagccagccttcttattcggccttgaattgatcatatgcggattagaaaaacaacttaaatgtgaaagtgggtcttaa

SEQ ID NO: 808 - DNA, 627 bp, Artificial Sequence
  synthetic construct; Sulfonylurea responsive repressor
atgggatctagattasataaaagtaaagtgattaacagcgcattagagctgcttaatgaggtcggaatcgaaggtttaacaacccgtaaactcgcccagaagctaggtgtagagcagcctacattgtattggcatgtaaaaaataagcgagctctgctcgacgcaatggccattgagatgctggataggcacgcgactcacgtctgccctttagaaggggaaagctggcaagattttttacgtaataacgctaaaagtatgagatgtgctttactaagtcatcgcgatggagcaaaagtatgtttaggtacaggctttacagaacagcaatatgaaactgccgaaaatagtctggcctttttatgccaacaaggtttttcactagagcacgcactgtatgcaatgcaggctgttggtatttatactttaggttgcgtattgttggatcaagagcttcaagtcgctaaagaagaaagggaaacacctactactgatagtatgccgccattagtccgacaagttctggaattaaaggatcaccaaggtgcagagccagccttcttattcggccttgaattgatcatatgcggattagaaaaacaacttaaatgtgaaagtgggtcttaa

SEQ ID NO: 809 - DNA, 627 bp, Artificial Sequence
  synthetic construct; Sulfonylurea responsive repressor
atgggatctagattmsmtwaaagtraagtgattaacagcgcattagagctgcttaatgaggtcggaatcgaaggtttaacaacccgtaaactcgcccagaagctaggtgtagagcagcctacattgtattggcatgtaaaaaataagcgagctctgctcgacgcattggccattgagatgctggataggcacgcgactcactattgccctttagaaggggaaagctggcaagattttttacgtaataacgctaaaagtatgagatgtgctttactaagtcatcgcgatggagcaaaagtatgtttaggtacaggctttacagaaaagcaatatgaagctgccgaaaatagtatggcctttttatgccaacaaggtttttcactagagcacgcactgtatgcaatgcaggctgttggtatttatactttaggttgcgtattgttggatcaagagcttcaagtcgctaaagaagaaagggaaacacctactactgatagtatgccgccattagtccgacaagctctggaattaaaggatcaccaaggtgcagagccagccttcttattcggccttgaattgatcatatgcggattagaaaaacaacttaaatgtgaaagtgggtcytaa

SEQ ID NO: 810 - DNA, 627 bp, Artificial Sequence
  synthetic construct; Sulfonylurea responsive repressor
atgggatctagattagwtwaamgkrragygattaacagcgcattagagctgcttaatgaggtcggaatcgaaggtttaacaacccgtaaactcgcccagaagctaggtgtagagcagcctacattgtattggcatgtaaaaaataagcgagctctgctcgacgcaatggccattgagatgctggataggcacgcgactcactattgccctttagaaggggaaagctggcaagattttttacgtaataacgctaaaagtatgagatgtgctttactaagtcatcgcgatggagcaaaagtatgtttaggtacaggctttacagaacagcaatatgaaagtgccgaaaatagtatggcctttttatgccaacaaggtttttcactagagaacgcaatgtatgcaatgcaggctgctggtatttttactttaggttgcgtattgttggatcaagagcttcaagtcgctaaagaagaaagggaaacacctactactgatagtatgccgccattactccgacaagttctggaattaaaggatcaccaaggtgcagagccagccttcttattcggccttgaattgatcatatgcggattagaaaaacaacttaaatgtgaaagtgggtcyyma

SEQ ID NO: 811 - DNA, 627 bp, Artificial Sequence
  synthetic construct; Sulfonylurea responsive repressor
atgggatctagattagatwaaagtarrgkgattaacagcgcattagagctgcttawtgaggtcggaatcgaaggtttaacaacccgtaaactcgcccagaagctaggtgtagagcagcctacattgtattggcatgtaaaaaataagcgagctctgctcgacgcaatggccattgagatgctggataggcacgcgactcacttctgccctttagaaggggaaagctggcaagattttttacgtaataacgctaaaagtatgagatgtgctttactaagtcatcgcgatggagcaaaagtatgtttaggtacaggctttacagaacagcaatatgaagctgccgaaaatagtatggcctttttatgccaacaaggtttttcactagagaacgcaatgtatgcaatgcaggctgttggtatttttactttaggttgcgtattgttggatcaagagcttcaagtcgctaaagaagaaagggaaacacctactactgatagtatgccgccattagtccgacaagttctggaattaaaggatcaccaaggtgcagagccagccttcttattcggccttgaattgatcatatgcggattagaaaaacaacttaaatgtgaaagtgggtcttaa

SEQ ID NO: 812 - DNA, 627 bp, Artificial Sequence
  synthetic construct; Sulfonylurea responsive repressor
atgggatctagattasatwaaagtaaagtgattaacagcgcattagagctgcttaatgaggtcggaatcgaaggtttaacaacccgtaaactcgcccagaagctaggtgtagagcagcctacattgtattggcatgtaaaaaataagcgagctctgctcgacgcaatggccattgagatgctggataggcacgcgactcactattgccctttagaaggggaaagctggcaagattttttacgtaataacgctaaaagtatgagatgtgctttactaagtcatcgcgatggagcaaaagtatgtttaggtacaggctttacagaacagcaatatgaaactgccgaaaatagtatggcctttttatgccaacaaggtttttcactagagcacgcaatgtatgcaatgcaggctgttggtatttatactttaggttgcgtattgttggatcaagagcttcaagtcgctaaagaagaaagggaaacacctactactgatagtatgccgccattactccgacaagttctggaattaaaggatcaccaaggtgcagagccagccttcttattcggccttgaattgatcatatgcggattagaaaaacaacttaaatgtgaaagtgggtcttaa

SEQ ID NO: 813 - DNA, 627 bp, Artificial Sequence
  synthetic construct; Sulfonylurea responsive repressor
atgggatctagattagataaaagtaaagtgattaacagcgcattagagctgcttaatgaggtcggaatcgaaggtttaacaacccgtaaactcgcccagaagctaggtgtagagcagcctacattgtattggcatgtaaaaaataagcgagctctgctcgacgcaatggccatggagatgctggataggcacgcgactcactattgccctttagaaggggaaagctggcaagattttttacgtaataacgctaaaagtatgagatgtgctttactaagtcatcgcgatggagcaaaagtatgtttaggtacaggctttacagaacagcaatatgaaagtgccgaaaatagtatggcctttttatgccaacaaggtttttcactagagaacgcactgtatgcaatgcaggctgttggtatttatactttaggttgcgtattgttggatcaagagcttcaagtcgctaaagaagaaagggaaacacctactactgatagtatgccgccattagtccgacaaggtctggaattaaaggatcaccaaggtgcagagccagccttcttattcggccttgaattgatcatatgcggattagaaaaacaacttaaatgtgaaagtgggtcttaa

SEQ ID NO: 814 - DNA, 627 bp, Artificial Sequence
  synthetic construct; Sulfonylurea responsive repressor
  misc_feature (536)..(536): n is a, c, g, or t
atgggatctagattagataaaagtaaagtgattaacagcgcattagagctgcttaatgaggtcggaatcgaaggtttaacaacccgtaaactcgcccagaagctaggtgtagagcagcctacattgtattggcatgtaaaaaataagcgagctctgctcgacgcattggccattgagatgctggataggcacgcgactcactattgccctttagaaggggaaagctggcaagattttttacgtaataacgctaaaagtatgagatgtgctttactaagtcatcgcgatggagcaaaagtatgtttaggtacaggctttacagaacagcaatatgaagctgccgaaaatagtctggcctttttatgccaacaaggtttttcactagagcacgcactgtatgcaatgcaggctgctggtatttatactttaggttgcgtattgttggatcaagagcttcaagtcgctaaagaagaaagggaaacacctactactgatagtatgccgccattactccgacaaggtctggaattaaaggntcaccaaggtgcagagccagccttcttattcggccttgaattgatcatatgcggattagaaaaacaacttaaatgtgaaagtgggtcttaa

SEQ ID NO: 815 - DNA, 627 bp, Artificial Sequence
  synthetic construct; Sulfonylurea responsive repressor
atgggatctagattmsmtwwaagkraagtgattaacagcgcattagagctgcttaatgaggtcggaatcgaaggtttaacaacccgtaaactcgcccagaagctaggtgtagagcagcctacattgtattggcatgtaaaaaataagcgagctctgctcgacgcaatggccattgagatgctggataggcacgcgactcactattgccctttagaaggggaaagctggcaagattttttacgtaataacgctaaaagtatgagatgtgctttactaagtcatcgcgatggagcaaaagtatgtttaggtacaggctttacagaacagcaatatgaaactgccgaaaatagtctggcctttttatgccaacaaggtttttcactagagaacgcaatgtatgcaatgcaggctgctggtatttatactttaggttgcgtattgttggatcaagagcttcaagtcgctaaagaagaaagggaaacacctactactgatagtatgccgccattactccgacaagttctggaattaaaggatcaccaaggtgcagagccagccttcttattcggccttgaattgatcatatgcggattagaaaaacaacttaaatgtgaaagtgggtcytaa

SEQ ID NO: 816 - DNA, 627 bp, Artificial Sequence; identical to SEQ ID NO: 718
  synthetic construct; Sulfonylurea responsive repressor

SEQ ID NO: 817 - DNA, 627 bp, Artificial Sequence
  synthetic construct; Sulfonylurea responsive repressor
atgggatctagattagataaaagtaaagtgattaacagcgcattagagctgcttaatgaggtcggaatcgaaggtttaacaacccgtaaactcgcccagaagctaggtgtagagcagcctacattgtattggcatgtaaaaaataagcgagctctgctcgacgcaatggccattgagatgctggataggcacgcgactcactattgccctttagaaggggaaagctggcaagattttttacgtaataacgctaaaagtatgagatgtgctttactaagtcatcgcgatggagcaaaagtatgtttaggtacaggctttacagaacagcaatatgaaactgccgaaaatagtatggcctttttatgccaacaaggtttttcactagagaacgcactgtatgcaatgcaggctgctggtatttttactttaggttgcgtattgttggatcaagagcttcaagtcgctaaagaagaaagggaaacacctactactgatagtatgccgccattagtccgacaagttctggaattaaaggatcaccaaggtgcagagccagccttcttattcggccttgaattgatcatatgcggattagaaaaacaacttaaatgtgaaagtgggtcttaa

SEQ ID NO: 818 - DNA, 627 bp, Artificial Sequence
  synthetic construct; Sulfonylurea responsive repressor
atgggatctagattagataaaagtaaagtgattaacagcgcattagagctgcttaatgaggtcggaatcgaaggtttaacaacccgtaaactcgcccagaagctaggtgtagagcagcctacattgtattggcatgtaaaaaataagcgagctctgctcgacgcaatggccattgagatgctggataggcacgcgactcacatctgccctttagaaggggaaagctggcaagattttttacgtaataacgctaaaagtatgagatgtgctttactaagtcatcgcgatggagcaaaagtatgtttaggtacaggctttacagaacagcaatatgaaactgccgaaaatagtatggcctttttatgccaacaaggtttttcactagagaacgcaatgtatgcaatgcaggctgtttgtatttatactttaggttgcgtattgttggatcaagagcttcaagtcgctaaagaagaaagggaaacacctactactgatagtatgccgccattagtccgacaagctctggaattaaaggatcaccaaggtgcagagccagccttcttattcggccttgaattgatcatatgcggattagaaaaacaacttaaatgtgaaagtgggtcttaa

SEQ ID NO: 819 - DNA, 624 bp, Artificial Sequence
  synthetic construct; Sulfonylurea responsive repressor
atgggatctagattagataaaagtaaagtgattaacagcgcattagagctgcttaatgaggtcggaatcgaaggtttaacaacccgtaaactcgcccagaagctaggtgtagagcagcctacattgtattggcatgtaaaaaataagcgagctctgctcgacgccttagccattgagatgatggataggcaccaaactcacttgtgccctttagaaggggaaagctggcaagattttttacgtaataatgctaaaagtatgagatgtgctttactaagccatcgcgatggagcaaaagtatgtttaggtacacgctggacagaacaaatgtatgaagctgctgaaaatatgttagcctttttatgccaacaaggtttttcactagagaatgcattatatgcagtgagtgctgtgagggtgtttactttaggttgcgtattgtttgatcaagagagccaagtcgctaaagaagaaagggaaacacctactactgctagtatgccgccattagtgcgacaagcttgggaattaaaggatcaccaaggtgcagagccagccttcttattcggccttgaattgatcatatgcggattagaaaaacaacttaaatgcgaaagtgggtct

SEQ ID NO: 820 - DNA, 624 bp, Artificial Sequence
  synthetic construct; Sulfonylurea responsive repressor
atgggatctagattagataaaagtaaagtgattaacagcgcattagagctgcttawtgaggtcggaatcgaaggtttaacaacccgtaaactcgcccagaagctaggtgtagagcagcctacattgtattggcatgtaaaaaataagcgagctctgctcgacgcaatggccattgagatgctggataggcacgcgactcactattgccctttagaaggggaaagctggcaagattttttacgtaataacgctaaaagtatgagatgtgctttactaagtcatcgcgatggagcaaaagtatgtttaggtacaggctttacagaacagcaatatgaagctgccgaaaatagtctggcctttttatgccaacaaggtttttcactagagaacgcactgtatgcaatgcaggctgttggtatttttactttaggttgcgtattgttggatcaagagcttcaagtcgctaaagaagaaagggaaacacctactactgatagtatgccgccattagtccgacaaggtctggaattaaaggatcaccaaggtgcagagccagccttcttattcggccttgaattgatcatatgcggattagaaaaacaacttaaatgtgaaagtgggtct

SEQ ID NO: 821 - DNA, 621 bp, Artificial Sequence
  synthetic construct; Sulfonylurea responsive repressor
atggccagactcgacaagagcaaggtgatcaacagcgcactggagctgctgaacgaggtcggaatcgaaggcctcacaacccgtaagctcgcccagaagctcggggttgagcagcctacattgtactggcacgtcaagaacaagcgagctctgctagacgctatggccattgagatgctcgatcgccacgctccccacttgagtctcttggaaggggaaagctggcaagacttcttgaggaacaacgctaagtccatgagaaacgctttgctcagtcaccgtgatggagccaaggtctgtctaggtacgggcttcacggagcaaaactatgaaactgctgagaacagccttgccttcctgacacaacaaggtttctcccttgagaacgccctctacgcatggcaagcactggggatctacactctgggttgcgcgttgctggatcaagagctgcaagtcgctaaggaggagagggaaacacctactactgatagtatgccgccactggttcgacaagctctggaactcaaggatcaccaaggtgcagagccagccttcctgttcggccttgaactgatcatagcaggattggagaagcagctgaaggccgaaagtgggtct

SEQ ID NO: 822 - DNA, 621 bp, Artificial Sequence
  synthetic construct; Sulfonylurea responsive repressor
atggccagactcgacaagagcaaggtgatcaacagcgcactggagctgctgaacgaggtcggaatcgaaggcctcacaacccgtaagctcgcccagaagctcggggttgagcagcctacattgtactggcacgtcaagaacaagcgagctctgctagacgctatggccattgagatgttcgataggcacaagacccactactgtcctttggaaggggaaagctggcaagacttcttgaggaacagggctaagtccatgagaaatgctttgctcagtcaccgtgatggagccaaggtcgctctaggtacgggcttcacggagcaacagtatgaaactatggagaactgtcttgccttcctgacacaacaaggtttctcccttgagaacgccctctacgcaatgcaagctgttgggatctacactctgggttgcgtcttgctggatcaagagctgcaagtcgctaaggaggagagggaaacacctactactgatagtatgccgccactggttcgacaagcttacgaactcagagatcaccaaggtgcagagccagccttcctgttcggccttgaactgatcataagtggattggagaagcagctgaaggcagaaagtgggtct

SEQ ID NO: 823 - DNA, 621 bp, Artificial Sequence
  synthetic construct; Sulfonylurea responsive repressor
atggccagactcgacaagagcaaggtgatcaacagcgcactggagctgctgaacgaggtcggaatcgaaggcctcacaacccgtaagctcgcccagaagctcggggttgagcagcctacattgtactggcacgtcaagaacaagcgagctctgctagacgctatggccttcgagatgctcgatcgccacgctatacactttttaccattggaaggggcaagctggcaaaatttcttgaggaacaccgctaagtccatgagaaacgctttgctcagtcaccgtgatggagccaaggtctgtctaggtacgggcttcacggagcgacaatatgaaactgcggagaaccgccttgccttcctgacacaacaaggtttctcccttgagcaggccctctacgcatggcaagcagtggggatctacactctgggttgtgtcttgctggatcaagagctgcaagtcgctaaggaggagagggaaacacctactactgatagtatgccgccactggttcgacaagcttgggaactcaaggatcaccaaggtgcagagccagccttcctgttcggccttgaactgatcatatcaggattggagaagcagctgaaggcagaaagtgggtct

SEQ ID NO: 824 - DNA, 621 bp, Artificial Sequence
  synthetic construct; Sulfonylurea responsive repressor
atggccagactcgacaagagcaaggtgatcaacagcgcactggagctgctgaacgaggtcggaatcgaaggcctcacaacccgtaagctcgcccagaagctcggggttgagcagcctacattgtactggcacgtcaagaacaagcgagctctgctagacgctatggccattgagatgctcgatcgccacgctatacacttgttacccttggaaggggaaagctggcaagacttcttgaggaacaacgctaagtccatgagatgcgctttgctcagtcaccgtgatggagccaaggtctgtctaggtacgggcttcacggagcaacaatatgaaactgcggagaaccgccttgccttcctgacacaacaaggtttctcccttgagaacgccctctacgcatggcaagcagtggggatctacactctgggttgtgtcttgctggatcaagagctgcaagtcgctaaggaggagagggaaacacctactactgatagtatgccgccactggttcgacaagctctggaactcaaggatcaccaaggtgcagagccagccttcctgttcggccttgaactgatcataggcggattggagaagcagctgaagagtgaaagtgggtct

SEQ ID NO: 825 - DNA, 621 bp, Artificial Sequence
  synthetic construct; Sulfonylurea responsive repressor
atggccagactcgacaagagcaaggtgatcaacagcgcactggagctgctgaacgaggtcggaatcgaaggcctcacaacccgtaaactcgcccagaagctcggggtagagcagcctacattgtattggcacgtcaagaacaagcgagctctgctagacgctatggccattgagatgctcgataggcacgctacccacgtgtgccctttggaaggggaaagctggcaagacttcttgaggaacaacgctaagatcatgagatgtgctttgctcagtcaccgtgatggagccaaggtctgtctaggtacaggcttcacggagcaacagtatgaaactgctgagaacagccttgccttcctgtgccaacaaggtttctcccttgagcatgccctctacgcaatgcaggctgctgggatcttcactctgggttgcgtattgctggatcaagagctgcaagtcgctaaggaggagagggaaacacctactactgatagtatgccgccactggttcgacaagctctggaactcaacgatcaccaaggtgcagagccagccttcctgttcggccttgaattgatcatatgcggattggagaagcagctgaagtgtgaaagtgggtct

SEQ ID NO: 826 - DNA, 621 bp, Artificial Sequence
  synthetic construct; Sulfonylurea responsive repressor
atggccagactcgacaagagcaaggtgatcaacagcgcactggagctgctgaacgaggtcggaatcgaaggcctcacaacccgtaaactcgcccagaagctcggggtagagcagcctacattgtattggcacgtcaagaacaagcgagctctgctagacgctatggccattgagatgctcgataggcacgctacccactactgccctttggaaggggaaagctggcaagacttcttgaggaacaacgctaagtccatgagatgtgctttgctcagtcaccgtgatggagccaaggtctgtctaggtacaggcttcacggagcaacagtatgaaactgctgagaacagccttgccttcctgtgccaacaaggtttctcccttgagaacgccctctacgcaatgcaggctgttgggatctatactctgggttgcgtattgctggatcaagagctgcaagtcgctaaggaggagagggaaacacctactactgatagtatgccgccactggttcgacaagctctggaactcaaggatcaccaaggtgcagagccagccttcctgttcggccttgaattgatcatatgcggattggagaagcagctgaagtgtgaaagtgggtct

SEQ ID NO: 827 - DNA, 621 bp, Artificial Sequence
  synthetic construct; Sulfonylurea responsive repressor
atggccagactcgacaagagcaaggtgatcaacagcgcactggagctgctgaacgaggtcggaatcgaaggcctcacaacccgtaaactcgcccagaagctcggggtagagcagcctacattgtattggcacgtcaagaacaagcgagctctgctagacgctatggccattgagatgctcgataggcacgctacccactactgccctttggaaggggaaagctggcaagacttcttgaggaacaacgctaagtccatgagatgtgctttgctcagtcaccgtgatggagccaaggtctgtctaggtacaggcttcacggagcaacagtatgaaactgctgagaacagcatggccttcctgtgccaacaaggtttctcccttgagaacgccctctacgcaatgcaggctgttgggatctatactctgggttgcgtattgctggatcaagagctgcaagtcgctaaggaggagagggaaacacctactactgatagtatgccgccactggttcgacaagctctggaactcaaggatcaccaaggtgcagagccagccttcctgttcggccttgaattgatcatatgcggattggagaagcagctgaagtgtgaaagtgggtct

SEQ ID NO: 828 - DNA, 621 bp, Artificial Sequence
  synthetic construct; Sulfonylurea responsive repressor
atggccagactcgacaagagcaaggtgatcaacagcgcactggagctgctgaacgaggtcggaatcgaaggcctcacaacccgtaaactcgcccagaagctcggggtagagcagcctacattgtattggcacgtcaagaacaagcgagctctgctagacgctatggccattgagatgctcgataggcacgctacccactactgccctttggaaggggaaagctggcaagacttcttgaggaacaacgctaagtccatgagatgtgctttgctcagtcaccgtgatggagccaaggtctgtctaggtacaggcttcacggagcaacagtatgaaactgctgagaacagccttgccttcctgtgccaacaaggtttctcccttgagcatgccatgtacgcaatgcaggctgctgggatctatactctgggttgcgtattgctggatcaagagctgcaagtcgctaaggaggagagggaaacacctactactgatagtatgccgccactggttcgacaagctctggaactcaaggatcaccaaggtgcagagccagccttcctgttcggccttgaattgatcatatgcggattggagaagcagctgaagtgtgaaagtgggtct

SEQ ID NO: 829 - DNA, 627 bp, Artificial Sequence
  synthetic construct; reverse sulfonylurea responsive repressor
atgggatctagattagataaaagtaaagtgattaacagcgcattagagctgcttaatgaggtcggaatcgaaggtttaacaacccgtaaactcgcccagaagctaggtgtagagcagcctacattgtattggcatgtaaaaaataagcgagctctgctcgacgccttagccattgagatgctggataggcacctgactcacttttgccctttagaaggggaaagctggcaagattttttacgtaataacgctaaaagtatgagatgtgctttactaagtcatcgcgatggagcaaaagtatggttaggtacaggctttacagaaaaacagtatgaaactaaggaaaatcggttagcctttttatgccaacaaggtttttcactagagaatgcattatatgcaatccgcgctgtgtcgcgttttactttaggttgcgtattgcaggatcaagagcctcaagtcgctaaagaagaaagggaaacacctactactgatagtatgccgccattattacgacaagctgtggaattatttgatcaccaaggtgcagagccagccttcttattcggccttgaattgatcatatgcggattagaaaaacaacttaaatgtgaaagtgagtcttaa

SEQ ID NO: 830 - DNA, 627 bp, Artificial Sequence
  synthetic construct; revers sulfonylurea responsive repressor
atgggatctagattagataaaagtaaagtgattaacagcgcattagagctgcttaatgaggtcggaatcgaaggtttaacaacccgtaaactcgcccagaagctaggtgtagagcagcctacattgtattggcatgtaaaaaataagcgagctctgctcgacgccttagccattgagatgctggataggcacgcgactcacttttgccctttagaaggggaaagctggcaagattttttacgtaataacgctaaaagttttagatgtgctttactaagtcatcgcgatggagcaaaagtatgtttaggtacagcgggtacagaaaaacagtatgaaactctcgaaaattgtttagcctttttatgccaacaaggtttttcactagagaatgcattatatgcaaggagcgctgtggtgtgttttactttaggttgcgtattgtttgatcaagagatgcaagtcgctaaagaagaaagggaaacacctactactgatagtatgccgccattattacgacaagctgcggaattactggatcaccaaggtgcagagccagccttcttattcggccttgaattgatcatatgcggattagaaaaacaacttaaatgtgaaagtgggtcttaa

SEQ ID NO: 831 - DNA, 627 bp, Artificial Sequence
  synthetic construct; reverse sulfonylurea responsive repressor
atgggatctagattagataaaagtaaagtgattaacagcgcattagagctgcttaatgaggtcggaatcgaaggtttaacaacccgtaaactcgcccagaagctaggtgtagagcagcctacattgtattggcatgtaaaaaataagcgagctctgctcgacgccttagccattgagatgctggataggcacgcgactcacttttgccctttagaaggggaaagctggcaagattttttacgtaatactgctaaaagtatgagatgtgctttactaagtcatcgcgatggagcaaaagtacttttaggtacagcgactacagaaaaacagtatgaaactctcgaaaatttgttagcctttttataccaacaaggtttttcactagagaatgcattatatgcatggcaggctgtgtggcgttttactttaggttgcgtattgattgatcaagagacgcaagtcgctaaagaagaaagggaaacacctactactgatagtatgccgccattattacgacaagctgtggaattaaaggatcaccaaggtgcagagccagccttcttattcggccttgaattgatcatatgcggattagaaaaacaacttaaatgtgaaactgggtcttaa

SEQ ID NO: 832 - DNA, 627 bp, Artificial Sequence
  synthetic construct; reverse sulfonylurea responsive repressor
atgggatctagattagataaaagtaaagtgattaacagcgcattagagctgcttaatgaggtcggaatcgaaggtttaacaacccgtaaactcgcccagaagctaggtgtagagcagcctacattgtattggcatgtaaaaaataagcgagctctgctcgacgccttagccattgagatgctggataggcacgcgactcacttttgccctttagaaggggaaagctggcaagattttttacgtaataacgctaaaagtatgagatgtgctttactaagtcatcgcgatggagcaaaagtacagttaggtacagcggcgacagaaaaacagtatgaaactctggaaaataagttagcctttttatgccaacaaggtttttcactagagaatgcattatatgcacacagcgctgtgactcagtttactttaggttgcgtattgcgggatcaagagggtcaagtcgctaaagaagaaagggaaacacctactactgatagtatgccgccattattacgacaagctcgggaattacgtgatcaccaaggtgcagagccagccttcttattcggccttgaattgatcatatgcggattagaaaaacaacttaaatgtgaaagtgggtcttaa

SEQ ID NO: 833 - DNA, 627 bp, Artificial Sequence
  synthetic construct; reverse sulfonylurea responsive repressor
atgggatctagattagataaaagtaaagtgattaacagcgcattagagctgcttaatgaggtcggaatcgaaggtttaacaacccgtaaactcgcccagaagctaggtgtagagcagcctacattgtattggcatgtaaaaaataagcgagctctgctcgacgccttagccattgagatggcggataggcacaatactcacttttgccctttagaaggggaaagctggcaagattttttacgtaatgctgctagaagtatgagatgtgctttactaagtcatcgcgatggagccaaagtatatttaggtacagcgaggacagaaaaacagtatgaaactaccgaaaatgttttagcctttttatgccaacaaggtttttcactagagaatgcattatatgcagtgcgcgctgtgcctcgttttactttaggttgcgtattgttggatcaagagaggcaagtcgctaaagaagaaagggaaacacctactactgatagtatgccgccattattacgacaagctagggaattaacggatcaccaaggtgcagagccagccttcttattcggccttgaattgatcatatgcggattagaaaaacaacttaaatgtgaaagtgggtcttaa

SEQ ID NO: 834 - DNA, 627 bp, Artificial Sequence
  synthetic construct; reverse sulfonylurea responsive repressor
atgggatctagattagataaaagtaaagtgattaacagcgcattagagctgcttaatgaggtcggaatcgaaggtttaacaacccgtaaactcgcccagaagctaggtgtagagcagcctacattgtattggcatgtaaaaaataagcgagctctgctcgacgccttagccattgagatggcggataggcaccatactcacttttgccctttagaaggggaaagctggcaagattttttacgtaatgctgctaaaagtatgagatgtgctttactaagtcatcgcgatggagcaaaagtacgtttaggtacagcgtggacagaaaaacagtatgaaactcacgaaaatgtgttagcctttttatgccaacaaggtttttcactagagaatgcattatatgcactgaaggctgtgtcagggtttactttaggttgcgtattgaaggatcaagagatgcaagtcgctaaagaagaaagggaaacacctactactgatagtatgccgccattattacgacaagctactgaattagttgatcaccaaggtgcagagccagccttcttattcggccttgaattgatcatatgcggattagaaaaacaacttaaatgtgaaagtgggtcttaa

SEQ ID NO: 835 - DNA, 627 bp, Artificial Sequence
  synthetic construct; reverse sulfonylurea responsive repressor
atgggatctagattagataaaagtaaagtgattaacagcgcattagagctgcttaatgaggtcggaatcgaaggtttaacaacccgtaaactcgcccagaagctaggtgtagagcagcctacattgtattggcatgtaaaaaataagcgagctctgctcgacgccttagccattgagatgatggataggcaccagactcacttttgccctttagaaggggaaagctggcaagattttttacgtaatactgctaaaagttatagatgtgctttactaagtcatcgcgatggagcaaaagtaattttaggtacacgctggacagaaaaacagtatgaaactcgcgaaaatgttttagcctttttatgccaacaaggtttttcactagagaatgcattatatgcatgggccgctgtgggtccgtttactttaggttgcgtattgcgtgatcaagagcggcaagtcgctaaagaagaaagggaaacacctactactgatagtatgccgccattattacgacaagctttggaattaatggatcaccaaggtgcagagccagccttcttattcggccttgaattgatcatatgcggattagaaaaacaacttaaatgtgaaagtgggtcttaa

SEQ ID NO: 836 - DNA, 627 bp, Artificial Sequence
  synthetic construct; reverse sulfonylurea responsive repressor
atgggatctagattagataaaagtaaagtgattaacagcgcattagagctgcttaatgaggtcggaatcgaaggtttaacaacccgtaaactcgcccagaagctaggtgtagagcagcctacattgtattggcatgtaaaaaataagcgagctctgctcgacgccttagccattgagatgctggataggaaccagactcacttttgccctttagaaggggaaagctggcaagattttttacgtaataacgctaaaagttggagatgtgctttactaagtcatcgcgatggagcaaaagtaatgttaggtacacgcaatacagaaaaacagtatgaaactgccgaaaatgggttagcctttttatgccaacaaggtttttcactagagaatgcattatatgcatgccgcgctgtgtggacgtttactttaggttgcgtattggatgatcaagagacgcaagtcgctaaagaagaaagggaaacacctactagtgatagtatgccgccattattacgacaagctatggaattaaaggatcaccaaggtgcagagccagccttcttattcggccttgaattgatcatatgcggattagaaaaacaacttaaatgtgaaagtgggtcttaa

SEQ ID NO: 837 - DNA, 48 bp, Artificial Sequence
  synthetic construct; oligo teto
cctaatttttgttgacactctatcattgatagagttattttaccactc

SEQ ID NO: 838 - DNA, 48 bp, Artificial Sequence
  synthetic construct; oligo teto
ggattaaaaacaactgtgagatagtaactatctcaataaaatggtgag

SEQ ID NO: 839 - DNA, 48 bp, Artificial Sequence
  synthetic construct; oligo control
cctaatttttgttgactgtgttagtccatagctggtattttaccactc

SEQ ID NO: 840 - DNA, 48 bp, Artificial Sequence
  synthetic construct; oligo control
ggattaaaaacaactgacacaatcaggtatcgaccataaaatggtgag

SEQ ID NO: 841 - DNA, 8131 bp, Artificial Sequence
  synthetic construct; PHPA
cgcgccggtacccgggtaccgagctcactagacgcggtgaaattacctaattaacaccggtgtttatcaaacaagtttgtacaaaaaagcaggctccggccagaatggcccggaccgggttaccgaattctagaaatccgtcaacatggtggagcacgacactctcgtctactccaagaatatcaaagatacagtctcagaagaccaaagggctattgagacttttcaacaaagggtaatatcgggaaacctcctcggattccattgcccagctatctgtcacttcatcaaaaggacagtagaaaaggaaggtggcacctacaaatgccatcattgcgataaaggaaaggctatcgttcaagatgcctctgccgacagtggtcccaaagatggacccccacccacgaggagcatcgtggaaaaagaagacgttccaaccacgtcttcaaagcaagtggattgatgtgatatctccactgacgtaagggatgacgcacaatcccactagactctatcagtgatagagtgtatataagactctatcagtgatagagtgaactctatcagtgatagagttgtacttatttttacaacaattaccaacaacaacaaacaacaaacaacattacaattactatttacaattacagtcgacccgggatccatggcctcctccgaggacgtcatcaaggagttcatgcgcttcaaggtgcgcatggagggctccgtgaacggccacgagttcgagatcgagggcgagggcgagggccgcccctacgagggcacccagaccgccaagctgaaggtgaccaagggcggccccctgcccttcgcctgggacatcctgtccccccagttccagtacggctccaaggtgtacgtgaagcaccccgccgacatccccgactacaagaagctgtccttccccgagggcttcaagtgggagcgcgtgatgaacttcgaggacggcggcgtggtgaccgtgacccaggactcctccctgcaggacggctccttcatctacaaggtgaagttcatcggcgtgaacttcccctccgacggccccgtaatgcagaagaagactatgggctgggaggcctccaccgagcgcctgtacccccgcgacggcgtgctgaagggcgagatccacaaggccctgaagctgaaggacggcggccactacctggtggagttcaagtccatctacatggccaagaagcccgtgcagctgcccggctactactacgtggactccaagctggacatcacctcccacaacgaggactacaccatcgtggagcagtacgagcgcgccgagggccgccaccacctgttcctgtagcggccccgctgaaatcaccagtctctctctacaaatctatctctctctataataatgtgtgagtagttcccagataagggaattagggttcttatagggtttcgctcatgtgttgagcatataagaaacccttagtatgtatttgtatttgtaaaatacttctatcaataaaatttctaattcctaaaaccaaaatccagtggcgagctcgagggtttacttattttgtgggtatctatacttttattagatttttaatcaggctcctgatttctttttatttcgattgaattcctgaacttgtattattcagtagatcgaataaattataaaaagataaaatcataaaataatattttatcctatcaatcatattaaagcaatgaatatgtaaaattaatcttatctttattttaaaaaatcatataggtttagtatttttttaaaaataaagataggattagttttactattcactgcttattacttttaaaaaaatcataaaggtttagtatttttttaaaataaatataggaatagttttactattcactgctttaatagaaaaatagtttaaaatttaagatagttttaatcccagcatttgccacgtttgaacgtgagccgaaacgatgtcgttacattatcttaacctagctgaaacgatgtcgtcataatatcgccaaatgccaactggactacgtcgaacccacaaatcccacaaagcgcgtgaaatcaaatcgctcaaaccacaaaaaagaacaacgcgtttgttacacgctcaatcccacgcgagtagagcacagtaaccttcaaataagcgaatggggcataatcagaaatccgaaataaacctaggggcattatcggaaatgaaaagtagctcactcaatataaaaatctaggaaccctagttttcgttatcactctgtgctccctcgctctatttctcagtctctgtgtttgcggctgaggattccgaacgagtgaccttcttcgtttctcgcaaaggtaacagcctctgctcttgtctcttcgattcgatctatgcctgtctcttatttacgatgatgtttcttcggttatgtttttttatttatgctttatgctgttgatgttcggttgtttgtttcgctttgtttttgtggttcagttttttaggattcttttggtttttgaatcgattaatcggaagagattttcgagttatttggtgtgttggaggtgaatcttttttttgaggtcatagatctgttgtatttgtgttataaacatgcgactttgtatgattttttacgaggttatgatgttctggttgttttattatgaatctgttgagacagaaccatgatttttgttgatgttcgtttacactattaaaggtttgttttaacaggattaaaagttttttaagcatgttgaaggagtcttgtagatatgtaaccgtcgatagtttttttgtgggtttgttcacatgttatcaagcttaatcttttactatgtatgcgaccatatctggatccagcaaaggcgattttttaattccttgtgaaacttttgtaatatgaagttgaaattttgttattggtaaactataaatgtgtgaagttggagtatacctttaccttcttatttggctttgtgatagtttaatttatatgtattttgagttctgacttgtatttctttgaattgattctagtttaagtaatccatggccagactcgacaagagcaaggtgatcaacagcgcactggagctgctgaacgaggtcggaatcgaaggcctcacaacccgtaagctcgcccagaagctcggggttgagcagcctacattgtactggcacgtcaagaacaagcgagctctgctagacgctatggccattgagatgctcgataggcacgctacccacgtgtgccctttggaaggggaaagctggcaagacttcttgaggaacaacgctaagatcatgagatgtgctttgctcagtcaccgtgatggagccaaggtctgtctaggtacgggcttcacggagcaacagtatgaaactgctgagaacagccttgccttcctgtgccaacaaggtttctcccttgagcatgccctctacgcaatgcaagctgctgggatcttcactctgggttgcgtcttgctggatcaagagctgcaagtcgctaaggaggagagggaaacacctactactgatagtatgccgccactggttcgacaagctctggaactcaacgatcaccaaggtgcagagccagccttcctgttcggccttgaactgatcatatgcggattggagaagcagctgaagtgtgaaagtgggtcttaatgatagctgcaggcatgccgctgaaatcaccagtctctctctacaaatctatctctctctataataatgtgtgagtagttcccagataagggaattagggttcttatagggtttcgctcatgtgttgagcatataagaaacccttagtatgtatttgtatttgtaaaatacttctatcaataaaatttctaattcctaaaaccaaaatccagtggcgagctcgagcccgggcacccagctttcttgtacaaagtggttcgataaacactagtaacggccgccagtgtgctggaattcgcccttcccaagctttgctctagatcaaactcacatccaaacataacatggatatcttccttaccaatcatactaattattttgggttaaatattaatcattatttttaagatattaattaagaaattaaaagattttttaaaaaaatgtataaaattatattattcatgatttttcatacatttgattttgataataaatatattttttttaatttcttaaaaaatgttgcaagacacttattagacatagtcttgttctgtttacaaaagcattcatcatttaatacattaaaaaatatttaatactaacagtagaatcttcttgtgagtggtgtgggagtaggcaacctggcattgaaacgagagaaagagagtcagaaccagaagacaaataaaaagtatgcaacaaacaaatcaaaatcaaagggcaaaggctggggttggctcaattggttgctacattcaattttcaactcagtcaacggttgagattcactctgacttccccaatctaagccgcggatgcaaacggttgaatctaacccacaatccaatctcgttacttaggggcttttccgtcattaactcacccctgccacccggtttccctataaattggaactcaatgctcccctctaaactcgtatcgcttcagagttgagaccaagacacactcgttcatatatctctctgctcttctcttctcttctacctctcaaggtacttttcttctccctctaccaaatcctagattccgtggttcaatttcggatcttgcacttctggtttgctttgccttgctttttcctcaactgggtccatctaggatccatgtgaaactctactctttctttaatatctgcggaatacgcgtttgactttcagatctagtcgaaatcatttcataattgcctttctttcttttagcttatgagaaataaaatcactttttttttatttcaaaataaaccttgggccttgtgctgactgagatggggtttggtgattacagaattttagcgaattttgtaattgtacttgtttgtctgtagttttgttttgttttcttgtttctcatacattccttaggcttcaattttattcgagtataggtcacaataggaattcaaactttgagcaggggaattaatcccttccttcaaatccagtttgtttgtatatatgtttaaaaaatgaaacttttgctttaaattctattataactttttttatggctgaaatttttgcatgtgtctttgctctctgttgtaaatttactgtttaggtactaactctaggcttgttgtgcagtttttgaagtataacaacagaagttcctattccgaagttcctattctctagaaagtataggaacttccaccacacaacacaatggcggccaccgcttccagaaccacccgattctcttcttcctcttcacaccccaccttccccaaacgcattactagatccaccctccctctctctcatcaaaccctcaccaaacccaaccacgctctcaaaatcaaatgttccatctccaaaccccccacggcggcgcccttcaccaaggaagcgccgaccacggagcccttcgtgtcacggttcgcctccggcgaacctcgcaagggcgcggacatccttgtggaggcgctggagaggcagggcgtgacgacggtgttcgcgtaccccggcggtgcgtcgatggagatccaccaggcgctcacgcgctccgccgccatccgcaacgtgctcccgcgccacgagcagggcggcgtcttcgccgccgaaggctacgcgcgttcctccggcctccccggcgtctgcattgccacctccggccccggcgccaccaacctcgtgagcggcctcgccgacgctttaatggacagcgtcccagtcgtcgccatcaccggccaggtcgcccgccggatgatcggcaccgacgccttccaagaaaccccgatcgtggaggtgagcagatccatcacgaagcacaactacctcatcctcgacgtcgacgacatcccccgcgtcgtcgccgaggctttcttcgtcgccacctccggccgccccggtccggtcctcatcgacattcccaaagacgttcagcagcaactcgccgtgcctaattgggacgagcccgttaacctccccggttacctcgccaggctgcccaggccccccgccgaggcccaattggaacacattgtcagactcatcatggaggcccaaaagcccgttctctacgtcggcggtggcagtttgaattccagtgctgaattgaggcgctttgttgaactcactggtattcccgttgctagcactttaatgggtcttggaacttttcctattggtgatgaatattcccttcagatgctgggtatgcatggtactgtttatgctaactatgctgttgacaatagtgatttgttgcttgcctttggggtaaggtttgatgaccgtgttactgggaagcttgaggcttttgctagtagggctaagattgttcacattgatattgattctgccgagattgggaagaacaagcaggcgcacgtgtcggtttgcgcggatttgaagttggccttgaagggaattaatatgattttggaggagaaaggagtggagggtaagtttgatcttggaggttggagagaagagattaatgtgcagaaacacaagtttccattgggttacaagacattccaggacgcgatttctccgcagcatgctatcgaggttcttgatgagttgactaatggagatgctattgttagtactggggttgggcagcatcaaatgtgggctgcgcagttttacaagtacaagagaccgaggcagtggttgacctcagggggtcttggagccatgggttttggattgcctgcggctattggtgctgctgttgctaaccctggggctgttgtggttgacattgatggggatggtagtttcatcatgaatgttcaggagttggccactataagagtggagaatctcccagttaagatattgttgttgaacaatcagcatttgggtatggtggttcagttggaggataggttctacaagtccaatagagctcacacctatcttggagatccgtctagcgagagcgagatattcccaaacatgctcaagtttgctgatgcttgtgggataccggcagcgcgagtgacgaagaaggaagagcttagagcggcaattcagagaatgttggacacccctggcccctaccttcttgatgtcattgtgccccatcaggagcatgtgttgccgatgattcccagtaatggatccttcaaggatgtgataactgagggtgatggtagaacgaggtactgattgcctagaccaaatgttccttgatgcttgttttgtacaatatatataagataatgctgtcctagttgcaggatttggcctgtggtgagcatcatagtctgtagtagttttggtagcaagacattttattttccttttatttaacttactacatgcagtagcatctatctatctctgtagtctgatatctcctgttgtctgtattgtgccgttggattttttgctgtagtgagactgaaaatgatgtgctagtaataatatttctgttagaaatctaagtagagaatctgttgaagaagtcaaaagctaatggaatcaggttacatattcaatgtttttctttttttagcggttggtagacgtgtagattcaacttctcttggagctcacctaggcaatcagtaaaatgcatattccttttttaacttgccatttatttacttttagtggaaattgtgaccaatttgttcatgtagaacggatttggaccattgcgtccacaaaacgtctcttttgctcgatcttcacaaagcgataccgaaatccagagatagttttcaaaagtcagaaatggcaaagttataaatagtaaaacagaatagatgctgtaatcgacttcaataacaagtggcatcacgtttctagttctagacccatcagctgggccggcccagctgatgatcccggtgaagttcctattccgaagttcctattctccagaaagtataggaacttcactagagcttgcggccgcgcatgctgacttaatcagctaacgccactcgagggggggcccggtaccgg

SEQ ID NO: 842 - DNA, 8131 bp, Artificial Sequence
  synthetic construct; PHPA
cgcgccggtacccgggtaccgagctcactagacgcggtgaaattacctaattaacaccggtgtttatcaaacaagtttgtacaaaaaagcaggctccggccagaatggcccggaccgggttaccgaattctagaaatccgtcaacatggtggagcacgacactctcgtctactccaagaatatcaaagatacagtctcagaagaccaaagggctattgagacttttcaacaaagggtaatatcgggaaacctcctcggattccattgcccagctatctgtcacttcatcaaaaggacagtagaaaaggaaggtggcacctacaaatgccatcattgcgataaaggaaaggctatcgttcaagatgcctctgccgacagtggtcccaaagatggacccccacccacgaggagcatcgtggaaaaagaagacgttccaaccacgtcttcaaagcaagtggattgatgtgatatctccactgacgtaagggatgacgcacaatcccactagactctatcagtgatagagtgtatataagactctatcagtgatagagtgaactctatcagtgatagagttgtacttatttttacaacaattaccaacaacaacaaacaacaaacaacattacaattactatttacaattacagtcgacccgggatccatggcctcctccgaggacgtcatcaaggagttcatgcgcttcaaggtgcgcatggagggctccgtgaacggccacgagttcgagatcgagggcgagggcgagggccgcccctacgagggcacccagaccgccaagctgaaggtgaccaagggcggccccctgcccttcgcctgggacatcctgtccccccagttccagtacggctccaaggtgtacgtgaagcaccccgccgacatccccgactacaagaagctgtccttccccgagggcttcaagtgggagcgcgtgatgaacttcgaggacggcggcgtggtgaccgtgacccaggactcctccctgcaggacggctccttcatctacaaggtgaagttcatcggcgtgaacttcccctccgacggccccgtaatgcagaagaagactatgggctgggaggcctccaccgagcgcctgtacccccgcgacggcgtgctgaagggcgagatccacaaggccctgaagctgaaggacggcggccactacctggtggagttcaagtccatctacatggccaagaagcccgtgcagctgcccggctactactacgtggactccaagctggacatcacctcccacaacgaggactacaccatcgtggagcagtacgagcgcgccgagggccgccaccacctgttcctgtagcggccccgctgaaatcaccagtctctctctacaaatctatctctctctataataatgtgtgagtagttcccagataagggaattagggttcttatagggtttcgctcatgtgttgagcatataagaaacccttagtatgtatttgtatttgtaaaatacttctatcaataaaatttctaattcctaaaaccaaaatccagtggcgagctcgagggtttacttattttgtgggtatctatacttttattagatttttaatcaggctcctgatttctttttatttcgattgaattcctgaacttgtattattcagtagatcgaataaattataaaaagataaaatcataaaataatattttatcctatcaatcatattaaagcaatgaatatgtaaaattaatcttatctttattttaaaaaatcatataggtttagtatttttttaaaaataaagataggattagttttactattcactgcttattacttttaaaaaaatcataaaggtttagtatttttttaaaataaatataggaatagttttactattcactgctttaatagaaaaatagtttaaaatttaagatagttttaatcccagcatttgccacgtttgaacgtgagccgaaacgatgtcgttacattatcttaacctagctgaaacgatgtcgtcataatatcgccaaatgccaactggactacgtcgaacccacaaatcccacaaagcgcgtgaaatcaaatcgctcaaaccacaaaaaagaacaacgcgtttgttacacgctcaatcccacgcgagtagagcacagtaaccttcaaataagcgaatggggcataatcagaaatccgaaataaacctaggggcattatcggaaatgaaaagtagctcactcaatataaaaatctaggaaccctagttttcgttatcactctgtgctccctcgctctatttctcagtctctgtgtttgcggctgaggattccgaacgagtgaccttcttcgtttctcgcaaaggtaacagcctctgctcttgtctcttcgattcgatctatgcctgtctcttatttacgatgatgtttcttcggttatgtttttttatttatgctttatgctgttgatgttcggttgtttgtttcgctttgtttttgtggttcagttttttaggattcttttggtttttgaatcgattaatcggaagagattttcgagttatttggtgtgttggaggtgaatcttttttttgaggtcatagatctgttgtatttgtgttataaacatgcgactttgtatgattttttacgaggttatgatgttctggttgttttattatgaatctgttgagacagaaccatgatttttgttgatgttcgtttacactattaaaggtttgttttaacaggattaaaagttttttaagcatgttgaaggagtcttgtagatatgtaaccgtcgatagtttttttgtgggtttgttcacatgttatcaagcttaatcttttactatgtatgcgaccatatctggatccagcaaaggcgattttttaattccttgtgaaacttttgtaatatgaagttgaaattttgttattggtaaactataaatgtgtgaagttggagtatacctttaccttcttatttggctttgtgatagtttaatttatatgtattttgagttctgacttgtatttctttgaattgattctagtttaagtaatccatggccagactcgacaagagcaaggtgatcaacagcgcactggagctgctgaacgaggtcggaatcgaaggcctcacaacccgtaagctcgcccagaagctcggggttgagcagcctacattgtactggcacgtcaagaacaagcgagctctgctagacgctatggccattgagatgctcgataggcacgctacccactactgccctttggaaggggaaagctggcaagacttcttgaggaacaacgctaagtccatgagatgtgctttgctcagtcaccgtgatggagccaaggtctgtctaggtacgggcttcacggagcaacagtatgaaactgctgagaacagccttgccttcctgtgccaacaaggtttctcccttgagaacgccctctacgcaatgcaagctgttgggatctacactctgggttgcgtcttgctggatcaagagctgcaagtcgctaaggaggagagggaaacacctactactgatagtatgccgccactggttcgacaagctctggaactcaaggatcaccaaggtgcagagccagccttcctgttcggccttgaactgatcatatgcggattggagaagcagctgaagtgtgaaagtgggtcttaatgatagctgcaggcatgccgctgaaatcaccagtctctctctacaaatctatctctctctataataatgtgtgagtagttcccagataagggaattagggttcttatagggtttcgctcatgtgttgagcatataagaaacccttagtatgtatttgtatttgtaaaatacttctatcaataaaatttctaattcctaaaaccaaaatccagtggcgagctcgagcccgggcacccagctttcttgtacaaagtggttcgataaacactagtaacggccgccagtgtgctggaattcgcccttcccaagctttgctctagatcaaactcacatccaaacataacatggatatcttccttaccaatcatactaattattttgggttaaatattaatcattatttttaagatattaattaagaaattaaaagattttttaaaaaaatgtataaaattatattattcatgatttttcatacatttgattttgataataaatatattttttttaatttcttaaaaaatgttgcaagacacttattagacatagtcttgttctgtttacaaaagcattcatcatttaatacattaaaaaatatttaatactaacagtagaatcttcttgtgagtggtgtgggagtaggcaacctggcattgaaacgagagaaagagagtcagaaccagaagacaaataaaaagtatgcaacaaacaaatcaaaatcaaagggcaaaggctggggttggctcaattggttgctacattcaattttcaactcagtcaacggttgagattcactctgacttccccaatctaagccgcggatgcaaacggttgaatctaacccacaatccaatctcgttacttaggggcttttccgtcattaactcacccctgccacccggtttccctataaattggaactcaatgctcccctctaaactcgtatcgcttcagagttgagaccaagacacactcgttcatatatctctctgctcttctcttctcttctacctctcaaggtacttttcttctccctctaccaaatcctagattccgtggttcaatttcggatcttgcacttctggtttgctttgccttgctttttcctcaactgggtccatctaggatccatgtgaaactctactctttctttaatatctgcggaatacgcgtttgactttcagatctagtcgaaatcatttcataattgcctttctttcttttagcttatgagaaataaaatcactttttttttatttcaaaataaaccttgggccttgtgctgactgagatggggtttggtgattacagaattttagcgaattttgtaattgtacttgtttgtctgtagttttgttttgttttcttgtttctcatacattccttaggcttcaattttattcgagtataggtcacaataggaattcaaactttgagcaggggaattaatcccttccttcaaatccagtttgtttgtatatatgtttaaaaaatgaaacttttgctttaaattctattataactttttttatggctgaaatttttgcatgtgtctttgctctctgttgtaaatttactgtttaggtactaactctaggcttgttgtgcagtttttgaagtataacaacagaagttcctattccgaagttcctattctctagaaagtataggaacttccaccacacaacacaatggcggccaccgcttccagaaccacccgattctcttcttcctcttcacaccccaccttccccaaacgcattactagatccaccctccctctctctcatcaaaccctcaccaaacccaaccacgctctcaaaatcaaatgttccatctccaaaccccccacggcggcgcccttcaccaaggaagcgccgaccacggagcccttcgtgtcacggttcgcctccggcgaacctcgcaagggcgcggacatccttgtggaggcgctggagaggcagggcgtgacgacggtgttcgcgtaccccggcggtgcgtcgatggagatccaccaggcgctcacgcgctccgccgccatccgcaacgtgctcccgcgccacgagcagggcggcgtcttcgccgccgaaggctacgcgcgttcctccggcctccccggcgtctgcattgccacctccggccccggcgccaccaacctcgtgagcggcctcgccgacgctttaatggacagcgtcccagtcgtcgccatcaccggccaggtcgcccgccggatgatcggcaccgacgccttccaagaaaccccgatcgtggaggtgagcagatccatcacgaagcacaactacctcatcctcgacgtcgacgacatcccccgcgtcgtcgccgaggctttcttcgtcgccacctccggccgccccggtccggtcctcatcgacattcccaaagacgttcagcagcaactcgccgtgcctaattgggacgagcccgttaacctccccggttacctcgccaggctgcccaggccccccgccgaggcccaattggaacacattgtcagactcatcatggaggcccaaaagcccgttctctacgtcggcggtggcagtttgaattccagtgctgaattgaggcgctttgttgaactcactggtattcccgttgctagcactttaatgggtcttggaacttttcctattggtgatgaatattcccttcagatgctgggtatgcatggtactgtttatgctaactatgctgttgacaatagtgatttgttgcttgcctttggggtaaggtttgatgaccgtgttactgggaagcttgaggcttttgctagtagggctaagattgttcacattgatattgattctgccgagattgggaagaacaagcaggcgcacgtgtcggtttgcgcggatttgaagttggccttgaagggaattaatatgattttggaggagaaaggagtggagggtaagtttgatcttggaggttggagagaagagattaatgtgcagaaacacaagtttccattgggttacaagacattccaggacgcgatttctccgcagcatgctatcgaggttcttgatgagttgactaatggagatgctattgttagtactggggttgggcagcatcaaatgtgggctgcgcagttttacaagtacaagagaccgaggcagtggttgacctcagggggtcttggagccatgggttttggattgcctgcggctattggtgctgctgttgctaaccctggggctgttgtggttgacattgatggggatggtagtttcatcatgaatgttcaggagttggccactataagagtggagaatctcccagttaagatattgttgttgaacaatcagcatttgggtatggtggttcagttggaggataggttctacaagtccaatagagctcacacctatcttggagatccgtctagcgagagcgagatattcccaaacatgctcaagtttgctgatgcttgtgggataccggcagcgcgagtgacgaagaaggaagagcttagagcggcaattcagagaatgttggacacccctggcccctaccttcttgatgtcattgtgccccatcaggagcatgtgttgccgatgattcccagtaatggatccttcaaggatgtgataactgagggtgatggtagaacgaggtactgattgcctagaccaaatgttccttgatgcttgttttgtacaatatatataagataatgctgtcctagttgcaggatttggcctgtggtgagcatcatagtctgtagtagttttggtagcaagacattttattttccttttatttaacttactacatgcagtagcatctatctatctctgtagtctgatatctcctgttgtctgtattgtgccgttggattttttgctgtagtgagactgaaaatgatgtgctagtaataatatttctgttagaaatctaagtagagaatctgttgaagaagtcaaaagctaatggaatcaggttacatattcaatgtttttctttttttagcggttggtagacgtgtagattcaacttctcttggagctcacctaggcaatcagtaaaatgcatattccttttttaacttgccatttatttacttttagtggaaattgtgaccaatttgttcatgtagaacggatttggaccattgcgtccacaaaacgtctcttttgctcgatcttcacaaagcgataccgaaatccagagatagttttcaaaagtcagaaatggcaaagttataaatagtaaaacagaatagatgctgtaatcgacttcaataacaagtggcatcacgtttctagttctagacccatcagctgggccggcccagctgatgatcccggtgaagttcctattccgaagttcctattctccagaaagtataggaacttcactagagcttgcggccgcgcatgctgacttaatcagctaacgccactcgagggggggcccggtaccgg

SEQ ID NO: 843 - DNA, 8131 bp, Artificial Sequence
  synthetic construct; PHPA
cgcgccggtacccgggtaccgagctcactagacgcggtgaaattacctaattaacaccggtgtttatcaaacaagtttgtacaaaaaagcaggctccggccagaatggcccggaccgggttaccgaattctagaaatccgtcaacatggtggagcacgacactctcgtctactccaagaatatcaaagatacagtctcagaagaccaaagggctattgagacttttcaacaaagggtaatatcgggaaacctcctcggattccattgcccagctatctgtcacttcatcaaaaggacagtagaaaaggaaggtggcacctacaaatgccatcattgcgataaaggaaaggctatcgttcaagatgcctctgccgacagtggtcccaaagatggacccccacccacgaggagcatcgtggaaaaagaagacgttccaaccacgtcttcaaagcaagtggattgatgtgatatctccactgacgtaagggatgacgcacaatcccactagactctatcagtgatagagtgtatataagactctatcagtgatagagtgaactctatcagtgatagagttgtacttatttttacaacaattaccaacaacaacaaacaacaaacaacattacaattactatttacaattacagtcgacccgggatccatggcctcctccgaggacgtcatcaaggagttcatgcgcttcaaggtgcgcatggagggctccgtgaacggccacgagttcgagatcgagggcgagggcgagggccgcccctacgagggcacccagaccgccaagctgaaggtgaccaagggcggccccctgcccttcgcctgggacatcctgtccccccagttccagtacggctccaaggtgtacgtgaagcaccccgccgacatccccgactacaagaagctgtccttccccgagggcttcaagtgggagcgcgtgatgaacttcgaggacggcggcgtggtgaccgtgacccaggactcctccctgcaggacggctccttcatctacaaggtgaagttcatcggcgtgaacttcccctccgacggccccgtaatgcagaagaagactatgggctgggaggcctccaccgagcgcctgtacccccgcgacggcgtgctgaagggcgagatccacaaggccctgaagctgaaggacggcggccactacctggtggagttcaagtccatctacatggccaagaagcccgtgcagctgcccggctactactacgtggactccaagctggacatcacctcccacaacgaggactacaccatcgtggagcagtacgagcgcgccgagggccgccaccacctgttcctgtagcggccccgctgaaatcaccagtctctctctacaaatctatctctctctataataatgtgtgagtagttcccagataagggaattagggttcttatagggtttcgctcatgtgttgagcatataagaaacccttagtatgtatttgtatttgtaaaatacttctatcaataaaatttctaattcctaaaaccaaaatccagtggcgagctcgagggtttacttattttgtgggtatctatacttttattagatttttaatcaggctcctgatttctttttatttcgattgaattcctgaacttgtattattcagtagatcgaataaattataaaaagataaaatcataaaataatattttatcctatcaatcatattaaagcaatgaatatgtaaaattaatcttatctttattttaaaaaatcatataggtttagtatttttttaaaaataaagataggattagttttactattcactgcttattacttttaaaaaaatcataaaggtttagtatttttttaaaataaatataggaatagttttactattcactgctttaatagaaaaatagtttaaaatttaagatagttttaatcccagcatttgccacgtttgaacgtgagccgaaacgatgtcgttacattatcttaacctagctgaaacgatgtcgtcataatatcgccaaatgccaactggactacgtcgaacccacaaatcccacaaagcgcgtgaaatcaaatcgctcaaaccacaaaaaagaacaacgcgtttgttacacgctcaatcccacgcgagtagagcacagtaaccttcaaataagcgaatggggcataatcagaaatccgaaataaacctaggggcattatcggaaatgaaaagtagctcactcaatataaaaatctaggaaccctagttttcgttatcactctgtgctccctcgctctatttctcagtctctgtgtttgcggctgaggattccgaacgagtgaccttcttcgtttctcgcaaaggtaacagcctctgctcttgtctcttcgattcgatctatgcctgtctcttatttacgatgatgtttcttcggttatgtttttttatttatgctttatgctgttgatgttcggttgtttgtttcgctttgtttttgtggttcagttttttaggattcttttggtttttgaatcgattaatcggaagagattttcgagttatttggtgtgttggaggtgaatcttttttttgaggtcatagatctgttgtatttgtgttataaacatgcgactttgtatgattttttacgaggttatgatgttctggttgttttattatgaatctgttgagacagaaccatgatttttgttgatgttcgtttacactattaaaggtttgttttaacaggattaaaagttttttaagcatgttgaaggagtcttgtagatatgtaaccgtcgatagtttttttgtgggtttgttcacatgttatcaagcttaatcttttactatgtatgcgaccatatctggatccagcaaaggcgattttttaattccttgtgaaacttttgtaatatgaagttgaaattttgttattggtaaactataaatgtgtgaagttggagtatacctttaccttcttatttggctttgtgatagtttaatttatatgtattttgagttctgacttgtatttctttgaattgattctagtttaagtaatccatggccagactcgacaagagcaaggtgatcaacagcgcactggagctgctgaacgaggtcggaatcgaaggcctcacaacccgtaagctcgcccagaagctcggggttgagcagcctacattgtactggcacgtcaagaacaagcgagctctgctagacgctatggccattgagatgctcgataggcacgctacccactactgccctttggaaggggaaagctggcaagacttcttgaggaacaacgctaagtccatgagatgtgctttgctcagtcaccgtgatggagccaaggtctgtctaggtacgggcttcacggagcaacagtatgaaactgctgagaacagcatggccttcctgtgccaacaaggtttctcccttgagaacgccctctacgcaatgcaagctgttgggatctacactctgggttgcgtcttgctggatcaagagctgcaagtcgctaaggaggagagggaaacacctactactgatagtatgccgccactggttcgacaagctctggaactcaaggatcaccaaggtgcagagccagccttcctgttcggccttgaactgatcatatgcggattggagaagcagctgaagtgtgaaagtgggtcttaatgatagctgcaggcatgccgctgaaatcaccagtctctctctacaaatctatctctctctataataatgtgtgagtagttcccagataagggaattagggttcttatagggtttcgctcatgtgttgagcatataagaaacccttagtatgtatttgtatttgtaaaatacttctatcaataaaatttctaattcctaaaaccaaaatccagtggcgagctcgagcccgggcacccagctttcttgtacaaagtggttcgataaacactagtaacggccgccagtgtgctggaattcgcccttcccaagctttgctctagatcaaactcacatccaaacataacatggatatcttccttaccaatcatactaattattttgggttaaatattaatcattatttttaagatattaattaagaaattaaaagattttttaaaaaaatgtataaaattatattattcatgatttttcatacatttgattttgataataaatatattttttttaatttcttaaaaaatgttgcaagacacttattagacatagtcttgttctgtttacaaaagcattcatcatttaatacattaaaaaatatttaatactaacagtagaatcttcttgtgagtggtgtgggagtaggcaacctggcattgaaacgagagaaagagagtcagaaccagaagacaaataaaaagtatgcaacaaacaaatcaaaatcaaagggcaaaggctggggttggctcaattggttgctacattcaattttcaactcagtcaacggttgagattcactctgacttccccaatctaagccgcggatgcaaacggttgaatctaacccacaatccaatctcgttacttaggggcttttccgtcattaactcacccctgccacccggtttccctataaattggaactcaatgctcccctctaaactcgtatcgcttcagagttgagaccaagacacactcgttcatatatctctctgctcttctcttctcttctacctctcaaggtacttttcttctccctctaccaaatcctagattccgtggttcaatttcggatcttgcacttctggtttgctttgccttgctttttcctcaactgggtccatctaggatccatgtgaaactctactctttctttaatatctgcggaatacgcgtttgactttcagatctagtcgaaatcatttcataattgcctttctttcttttagcttatgagaaataaaatcactttttttttatttcaaaataaaccttgggccttgtgctgactgagatggggtttggtgattacagaattttagcgaattttgtaattgtacttgtttgtctgtagttttgttttgttttcttgtttctcatacattccttaggcttcaattttattcgagtataggtcacaataggaattcaaactttgagcaggggaattaatcccttccttcaaatccagtttgtttgtatatatgtttaaaaaatgaaacttttgctttaaattctattataactttttttatggctgaaatttttgcatgtgtctttgctctctgttgtaaatttactgtttaggtactaactctaggcttgttgtgcagtttttgaagtataacaacagaagttcctattccgaagttcctattctctagaaagtataggaacttccaccacacaacacaatggcggccaccgcttccagaaccacccgattctcttcttcctcttcacaccccaccttccccaaacgcattactagatccaccctccctctctctcatcaaaccctcaccaaacccaaccacgctctcaaaatcaaatgttccatctccaaaccccccacggcggcgcccttcaccaaggaagcgccgaccacggagcccttcgtgtcacggttcgcctccggcgaacctcgcaagggcgcggacatccttgtggaggcgctggagaggcagggcgtgacgacggtgttcgcgtaccccggcggtgcgtcgatggagatccaccaggcgctcacgcgctccgccgccatccgcaacgtgctcccgcgccacgagcagggcggcgtcttcgccgccgaaggctacgcgcgttcctccggcctccccggcgtctgcattgccacctccggccccggcgccaccaacctcgtgagcggcctcgccgacgctttaatggacagcgtcccagtcgtcgccatcaccggccaggtcgcccgccggatgatcggcaccgacgccttccaagaaaccccgatcgtggaggtgagcagatccatcacgaagcacaactacctcatcctcgacgtcgacgacatcccccgcgtcgtcgccgaggctttcttcgtcgccacctccggccgccccggtccggtcctcatcgacattcccaaagacgttcagcagcaactcgccgtgcctaattgggacgagcccgttaacctccccggttacctcgccaggctgcccaggccccccgccgaggcccaattggaacacattgtcagactcatcatggaggcccaaaagcccgttctctacgtcggcggtggcagtttgaattccagtgctgaattgaggcgctttgttgaactcactggtattcccgttgctagcactttaatgggtcttggaacttttcctattggtgatgaatattcccttcagatgctgggtatgcatggtactgtttatgctaactatgctgttgacaatagtgatttgttgcttgcctttggggtaaggtttgatgaccgtgttactgggaagcttgaggcttttgctagtagggctaagattgttcacattgatattgattctgccgagattgggaagaacaagcaggcgcacgtgtcggtttgcgcggatttgaagttggccttgaagggaattaatatgattttggaggagaaaggagtggagggtaagtttgatcttggaggttggagagaagagattaatgtgcagaaacacaagtttccattgggttacaagacattccaggacgcgatttctccgcagcatgctatcgaggttcttgatgagttgactaatggagatgctattgttagtactggggttgggcagcatcaaatgtgggctgcgcagttttacaagtacaagagaccgaggcagtggttgacctcagggggtcttggagccatgggttttggattgcctgcggctattggtgctgctgttgctaaccctggggctgttgtggttgacattgatggggatggtagtttcatcatgaatgttcaggagttggccactataagagtggagaatctcccagttaagatattgttgttgaacaatcagcatttgggtatggtggttcagttggaggataggttctacaagtccaatagagctcacacctatcttggagatccgtctagcgagagcgagatattcccaaacatgctcaagtttgctgatgcttgtgggataccggcagcgcgagtgacgaagaaggaagagcttagagcggcaattcagagaatgttggacacccctggcccctaccttcttgatgtcattgtgccccatcaggagcatgtgttgccgatgattcccagtaatggatccttcaaggatgtgataactgagggtgatggtagaacgaggtactgattgcctagaccaaatgttccttgatgcttgttttgtacaatatatataagataatgctgtcctagttgcaggatttggcctgtggtgagcatcatagtctgtagtagttttggtagcaagacattttattttccttttatttaacttactacatgcagtagcatctatctatctctgtagtctgatatctcctgttgtctgtattgtgccgttggattttttgctgtagtgagactgaaaatgatgtgctagtaataatatttctgttagaaatctaagtagagaatctgttgaagaagtcaaaagctaatggaatcaggttacatattcaatgtttttctttttttagcggttggtagacgtgtagattcaacttctcttggagctcacctaggcaatcagtaaaatgcatattccttttttaacttgccatttatttacttttagtggaaattgtgaccaatttgttcatgtagaacggatttggaccattgcgtccacaaaacgtctcttttgctcgatcttcacaaagcgataccgaaatccagagatagttttcaaaagtcagaaatggcaaagttataaatagtaaaacagaatagatgctgtaatcgacttcaataacaagtggcatcacgtttctagttctagacccatcagctgggccggcccagctgatgatcccggtgaagttcctattccgaagttcctattctccagaaagtataggaacttcactagagcttgcggccgcgcatgctgacttaatcagctaacgccactcgagggggggcccggtaccgg

SEQ ID NO: 844 - DNA, 8131 bp, Artificial Sequence
  synthetic construct; PHPA
cgcgccggtacccgggtaccgagctcactagacgcggtgaaattacctaattaacaccggtgtttatcaaacaagtttgtacaaaaaagcaggctccggccagaatggcccggaccgggttaccgaattctagaaatccgtcaacatggtggagcacgacactctcgtctactccaagaatatcaaagatacagtctcagaagaccaaagggctattgagacttttcaacaaagggtaatatcgggaaacctcctcggattccattgcccagctatctgtcacttcatcaaaaggacagtagaaaaggaaggtggcacctacaaatgccatcattgcgataaaggaaaggctatcgttcaagatgcctctgccgacagtggtcccaaagatggacccccacccacgaggagcatcgtggaaaaagaagacgttccaaccacgtcttcaaagcaagtggattgatgtgatatctccactgacgtaagggatgacgcacaatcccactagactctatcagtgatagagtgtatataagactctatcagtgatagagtgaactctatcagtgatagagttgtacttatttttacaacaattaccaacaacaacaaacaacaaacaacattacaattactatttacaattacagtcgacccgggatccatggcctcctccgaggacgtcatcaaggagttcatgcgcttcaaggtgcgcatggagggctccgtgaacggccacgagttcgagatcgagggcgagggcgagggccgcccctacgagggcacccagaccgccaagctgaaggtgaccaagggcggccccctgcccttcgcctgggacatcctgtccccccagttccagtacggctccaaggtgtacgtgaagcaccccgccgacatccccgactacaagaagctgtccttccccgagggcttcaagtgggagcgcgtgatgaacttcgaggacggcggcgtggtgaccgtgacccaggactcctccctgcaggacggctccttcatctacaaggtgaagttcatcggcgtgaacttcccctccgacggccccgtaatgcagaagaagactatgggctgggaggcctccaccgagcgcctgtacccccgcgacggcgtgctgaagggcgagatccacaaggccctgaagctgaaggacggcggccactacctggtggagttcaagtccatctacatggccaagaagcccgtgcagctgcccggctactactacgtggactccaagctggacatcacctcccacaacgaggactacaccatcgtggagcagtacgagcgcgccgagggccgccaccacctgttcctgtagcggccccgctgaaatcaccagtctctctctacaaatctatctctctctataataatgtgtgagtagttcccagataagggaattagggttcttatagggtttcgctcatgtgttgagcatataagaaacccttagtatgtatttgtatttgtaaaatacttctatcaataaaatttctaattcctaaaaccaaaatccagtggcgagctcgagggtttacttattttgtgggtatctatacttttattagatttttaatcaggctcctgatttctttttatttcgattgaattcctgaacttgtattattcagtagatcgaataaattataaaaagataaaatcataaaataatattttatcctatcaatcatattaaagcaatgaatatgtaaaattaatcttatctttattttaaaaaatcatataggtttagtatttttttaaaaataaagataggattagttttactattcactgcttattacttttaaaaaaatcataaaggtttagtatttttttaaaataaatataggaatagttttactattcactgctttaatagaaaaatagtttaaaatttaagatagttttaatcccagcatttgccacgtttgaacgtgagccgaaacgatgtcgttacattatcttaacctagctgaaacgatgtcgtcataatatcgccaaatgccaactggactacgtcgaacccacaaatcccacaaagcgcgtgaaatcaaatcgctcaaaccacaaaaaagaacaacgcgtttgttacacgctcaatcccacgcgagtagagcacagtaaccttcaaataagcgaatggggcataatcagaaatccgaaataaacctaggggcattatcggaaatgaaaagtagctcactcaatataaaaatctaggaaccctagttttcgttatcactctgtgctccctcgctctatttctcagtctctgtgtttgcggctgaggattccgaacgagtgaccttcttcgtttctcgcaaaggtaacagcctctgctcttgtctcttcgattcgatctatgcctgtctcttatttacgatgatgtttcttcggttatgtttttttatttatgctttatgctgttgatgttcggttgtttgtttcgctttgtttttgtggttcagttttttaggattcttttggtttttgaatcgattaatcggaagagattttcgagttatttggtgtgttggaggtgaatcttttttttgaggtcatagatctgttgtatttgtgttataaacatgcgactttgtatgattttttacgaggttatgatgttctggttgttttattatgaatctgttgagacagaaccatgatttttgttgatgttcgtttacactattaaaggtttgttttaacaggattaaaagttttttaagcatgttgaaggagtcttgtagatatgtaaccgtcgatagtttttttgtgggtttgttcacatgttatcaagcttaatcttttactatgtatgcgaccatatctggatccagcaaaggcgattttttaattccttgtgaaacttttgtaatatgaagttgaaattttgttattggtaaactataaatgtgtgaagttggagtatacctttaccttcttatttggctttgtgatagtttaatttatatgtattttgagttctgacttgtatttctttgaattgattctagtttaagtaatccatggccagactcgacaagagcaaggtgatcaacagcgcactggagctgctgaacgaggtcggaatcgaaggcctcacaacccgtaagctcgcccagaagctcggggttgagcagcctacattgtactggcacgtcaagaacaagcgagctctgctagacgctatggccattgagatgctcgataggcacgctacccactactgccctttggaaggggaaagctggcaagacttcttgaggaacaacgctaagtccatgagatgtgctttgctcagtcaccgtgatggagccaaggtctgtctaggtacgggcttcacggagcaacagtatgaaactgctgagaacagccttgccttcctgtgccaacaaggtttctcccttgagcatgccatgtacgcaatgcaagctgctgggatctacactctgggttgcgtcttgctggatcaagagctgcaagtcgctaaggaggagagggaaacacctactactgatagtatgccgccactggttcgacaagctctggaactcaaggatcaccaaggtgcagagccagccttcctgttcggccttgaactgatcatatgcggattggagaagcagctgaagtgtgaaagtgggtcttaatgatagctgcaggcatgccgctgaaatcaccagtctctctctacaaatctatctctctctataataatgtgtgagtagttcccagataagggaattagggttcttatagggtttcgctcatgtgttgagcatataagaaacccttagtatgtatttgtatttgtaaaatacttctatcaataaaatttctaattcctaaaaccaaaatccagtggcgagctcgagcccgggcacccagctttcttgtacaaagtggttcgataaacactagtaacggccgccagtgtgctggaattcgcccttcccaagctttgctctagatcaaactcacatccaaacataacatggatatcttccttaccaatcatactaattattttgggttaaatattaatcattatttttaagatattaattaagaaattaaaagattttttaaaaaaatgtataaaattatattattcatgatttttcatacatttgattttgataataaatatattttttttaatttcttaaaaaatgttgcaagacacttattagacatagtcttgttctgtttacaaaagcattcatcatttaatacattaaaaaatatttaatactaacagtagaatcttcttgtgagtggtgtgggagtaggcaacctggcattgaaacgagagaaagagagtcagaaccagaagacaaataaaaagtatgcaacaaacaaatcaaaatcaaagggcaaaggctggggttggctcaattggttgctacattcaattttcaactcagtcaacggttgagattcactctgacttccccaatctaagccgcggatgcaaacggttgaatctaacccacaatccaatctcgttacttaggggcttttccgtcattaactcacccctgccacccggtttccctataaattggaactcaatgctcccctctaaactcgtatcgcttcagagttgagaccaagacacactcgttcatatatctctctgctcttctcttctcttctacctctcaaggtacttttcttctccctctaccaaatcctagattccgtggttcaatttcggatcttgcacttctggtttgctttgccttgctttttcctcaactgggtccatctaggatccatgtgaaactctactctttctttaatatctgcggaatacgcgtttgactttcagatctagtcgaaatcatttcataattgcctttctttcttttagcttatgagaaataaaatcactttttttttatttcaaaataaaccttgggccttgtgctgactgagatggggtttggtgattacagaattttagcgaattttgtaattgtacttgtttgtctgtagttttgttttgttttcttgtttctcatacattccttaggcttcaattttattcgagtataggtcacaataggaattcaaactttgagcaggggaattaatcccttccttcaaatccagtttgtttgtatatatgtttaaaaaatgaaacttttgctttaaattctattataactttttttatggctgaaatttttgcatgtgtctttgctctctgttgtaaatttactgtttaggtactaactctaggcttgttgtgcagtttttgaagtataacaacagaagttcctattccgaagttcctattctctagaaagtataggaacttccaccacacaacacaatggcggccaccgcttccagaaccacccgattctcttcttcctcttcacaccccaccttccccaaacgcattactagatccaccctccctctctctcatcaaaccctcaccaaacccaaccacgctctcaaaatcaaatgttccatctccaaaccccccacggcggcgcccttcaccaaggaagcgccgaccacggagcccttcgtgtcacggttcgcctccggcgaacctcgcaagggcgcggacatccttgtggaggcgctggagaggcagggcgtgacgacggtgttcgcgtaccccggcggtgcgtcgatggagatccaccaggcgctcacgcgctccgccgccatccgcaacgtgctcccgcgccacgagcagggcggcgtcttcgccgccgaaggctacgcgcgttcctccggcctccccggcgtctgcattgccacctccggccccggcgccaccaacctcgtgagcggcctcgccgacgctttaatggacagcgtcccagtcgtcgccatcaccggccaggtcgcccgccggatgatcggcaccgacgccttccaagaaaccccgatcgtggaggtgagcagatccatcacgaagcacaactacctcatcctcgacgtcgacgacatcccccgcgtcgtcgccgaggctttcttcgtcgccacctccggccgccccggtccggtcctcatcgacattcccaaagacgttcagcagcaactcgccgtgcctaattgggacgagcccgttaacctccccggttacctcgccaggctgcccaggccccccgccgaggcccaattggaacacattgtcagactcatcatggaggcccaaaagcccgttctctacgtcggcggtggcagtttgaattccagtgctgaattgaggcgctttgttgaactcactggtattcccgttgctagcactttaatgggtcttggaacttttcctattggtgatgaatattcccttcagatgctgggtatgcatggtactgtttatgctaactatgctgttgacaatagtgatttgttgcttgcctttggggtaaggtttgatgaccgtgttactgggaagcttgaggcttttgctagtagggctaagattgttcacattgatattgattctgccgagattgggaagaacaagcaggcgcacgtgtcggtttgcgcggatttgaagttggccttgaagggaattaatatgattttggaggagaaaggagtggagggtaagtttgatcttggaggttggagagaagagattaatgtgcagaaacacaagtttccattgggttacaagacattccaggacgcgatttctccgcagcatgctatcgaggttcttgatgagttgactaatggagatgctattgttagtactggggttgggcagcatcaaatgtgggctgcgcagttttacaagtacaagagaccgaggcagtggttgacctcagggggtcttggagccatgggttttggattgcctgcggctattggtgctgctgttgctaaccctggggctgttgtggttgacattgatggggatggtagtttcatcatgaatgttcaggagttggccactataagagtggagaatctcccagttaagatattgttgttgaacaatcagcatttgggtatggtggttcagttggaggataggttctacaagtccaatagagctcacacctatcttggagatccgtctagcgagagcgagatattcccaaacatgctcaagtttgctgatgcttgtgggataccggcagcgcgagtgacgaagaaggaagagcttagagcggcaattcagagaatgttggacacccctggcccctaccttcttgatgtcattgtgccccatcaggagcatgtgttgccgatgattcccagtaatggatccttcaaggatgtgataactgagggtgatggtagaacgaggtactgattgcctagaccaaatgttccttgatgcttgttttgtacaatatatataagataatgctgtcctagttgcaggatttggcctgtggtgagcatcatagtctgtagtagttttggtagcaagacattttattttccttttatttaacttactacatgcagtagcatctatctatctctgtagtctgatatctcctgttgtctgtattgtgccgttggattttttgctgtagtgagactgaaaatgatgtgctagtaataatatttctgttagaaatctaagtagagaatctgttgaagaagtcaaaagctaatggaatcaggttacatattcaatgtttttctttttttagcggttggtagacgtgtagattcaacttctcttggagctcacctaggcaatcagtaaaatgcatattccttttttaacttgccatttatttacttttagtggaaattgtgaccaatttgttcatgtagaacggatttggaccattgcgtccacaaaacgtctcttttgctcgatcttcacaaagcgataccgaaatccagagatagttttcaaaagtcagaaatggcaaagttataaatagtaaaacagaatagatgctgtaatcgacttcaataacaagtggcatcacgtttctagttctagacccatcagctgggccggcccagctgatgatcccggtgaagttcctattccgaagttcctattctccagaaagtataggaacttcactagagcttgcggccgcgcatgctgacttaatcagctaacgccactcgagggggggcccggtaccgg

SEQ ID NO: 845 - DNA, 8201 bp, Artificial Sequence
  synthetic construct; PHPA
cgcgccggtacccgggtaccgagctcactagacgcggtgaaattacctaattaacaccggtgtttatcaaacaagtttgtacaaaaaagcaggctccggccagaatggcccggaccgggttaccgaattctagaaatccgtcaacatggtggagcacgacactctcgtctactccaagaatatcaaagatacagtctcagaagaccaaagggctattgagacttttcaacaaagggtaatatcgggaaacctcctcggattccattgcccagctatctgtcacttcatcaaaaggacagtagaaaaggaaggtggcacctacaaatgccatcattgcgataaaggaaaggctatcgttcaagatgcctctgccgacagtggtcccaaagatggacccccacccacgaggagcatcgtggaaaaagaagacgttccaaccacgtcttcaaagcaagtggattgatgtgatatctccactgacgtaagggatgacgcacaatcccactagactctatcagtgatagagtgtatataagactctatcagtgatagagtgaactctatcagtgatagagttgtacttatttttacaacaattaccaacaacaacaaacaacaaacaacattacaattactatttacaattacagtcgacatggcctcctccgaggacgtcatcaaggagttcatgcgcttcaaggtgcgcatggagggctccgtgaacggccacgagttcgagatcgagggcgagggcgagggccgcccctacgagggcacccagaccgccaagctgaaggtgaccaagggcggccccctgcccttcgcctgggacatcctgtccccccagttccagtacggctccaaggtgtacgtgaagcaccccgccgacatccccgactacaagaagctgtccttccccgagggcttcaagtgggagcgcgtgatgaacttcgaggacggcggcgtggtgaccgtgacccaggactcctccctgcaggacggctccttcatctacaaggtgaagttcatcggcgtgaacttcccctccgacggccccgtaatgcagaagaagactatgggctgggaggcctccaccgagcgcctgtacccccgcgacggcgtgctgaagggcgagatccacaaggccctgaagctgaaggacggcggccactacctggtggagttcaagtccatctacatggccaagaagcccgtgcagctgcccggctactactacgtggactccaagctggacatcacctcccacaacgaggactacaccatcgtggagcagtacgagcgcgccgagggccgccaccacctgttcctgtagcggccccgctgaaatcaccagtctctctctacaaatctatctctctctataataatgtgtgagtagttcccagataagggaattagggttcttatagggtttcgctcatgtgttgagcatataagaaacccttagtatgtatttgtatttgtaaaatacttctatcaataaaatttctaattcctaaaaccaaaatccagtggcgagctcgagtctagacccgggtttacttattttgtgggtatctatacttttattagatttttaatcaggctcctgatttctttttatttcgattgaattcctgaacttgtattattcagtagatcgaataaattataaaaagataaaatcataaaataatattttatcctatcaatcatattaaagcaatgaatatgtaaaattaatcttatctttattttaaaaaatcatataggtttagtatttttttaaaaataaagataggattagttttactattcactgcttattacttttaaaaaaatcataaaggtttagtatttttttaaaataaatataggaatagttttactattcactgctttaatagaaaaatagtttaaaatttaagatagttttaatcccagcatttgccacgtttgaacgtgagccgaaacgatgtcgttacattatcttaacctagctgaaacgatgtcgtcataatatcgccaaatgccaactggactacgtcgaacccacaaatcccacaaagcgcgtgaaatcaaatcgctcaaaccacaaaaaagaacaacgcgtttgttacacgctcaatcccacgcgagtagagcacagtaaccttcaaataagcgaatggggcataatcagaaatccgaaataaacctaggggcattatcggaaatgaaaagtagctcactcaatataaaaatctaggaaccctagttttcgttatcactctgtgctccctcgctctatttctcagtctctgtgtttgcggctgaggattccgaacgagtgaccttcttcgtttctcgcaaaggtaacagcctctgctcttgtctcttcgattcgatctatgcctgtctcttatttacgatgatgtttcttcggttatgtttttttatttatgctttatgctgttgatgttcggttgtttgtttcgctttgtttttgtggttcagttttttaggattcttttggtttttgaatcgattaatcggaagagattttcgagttatttggtgtgttggaggtgaatcttttttttgaggtcatagatctgttgtatttgtgttataaacatgcgactttgtatgattttttacgaggttatgatgttctggttgttttattatgaatctgttgagacagaaccatgatttttgttgatgttcgtttacactattaaaggtttgttttaacaggattaaaagttttttaagcatgttgaaggagtcttgtagatatgtaaccgtcgatagtttttttgtgggtttgttcacatgttatcaagcttaatcttttactatgtatgcgaccatatctggatccagcaaaggcgattttttaattccttgtgaaacttttgtaatatgaagttgaaattttgttattggtaaactataaatgtgtgaagttggagtatacctttaccttcttatttggctttgtgatagtttaatttatatgtattttgagttctgacttgtatttctttgaattgattctagtttaagtaatccatggccagactcgacaagagcaaggtgatcaacagcgcactggagctgctgaacgaggtcggaatcgaaggcctcacaacccgtaagctcgcccagaagctcggggttgagcagcctacattgtactggcacgtcaagaacaagcgagctctgctagacgctatggccatcgagatgctcgatccccacgctccccacttgttacccttggaaggggcaagctggcaagacttcttgaggaacaacgctaagtccatgagatgcgctttgctcagtcaccgtgatggagccaaggtctgtctaggtacgggcttcacggagcaacagtatgaaactgctgagaacagccttgccttcctgacacaacaaggtttctcccttgagaacgccctctacgcaatgcaagctgttgggatctacactctgggttgcgcgttgctggatcaagagctgcaagtcgctaaggaggagagggaaacacctactactgatagtatgccgccactggttcgacaagctctggaactcaaggatcaccaaggtgcagagccagccttcctgttcggccttgaactgatcataagcggattggagaagcagctgaagcgtgaaagtgggtcttaatgataggcggccgctaaagaaggagtgcgtcgaagcagatcgttcaaacatttggcaataaagtttcttaagattgaatcctgttgccggtcttgcgatgattatcatataatttctgttgaattacgttaagcatgtaataattaacatgtaatgcatgacgttatttatgagatgggtttttatgattagagtcccgcaattatacatttaatacgcgatagaaaacaaaatatagcgcgcaaactaggataaattatcgcgcgcggtgtcatctatgttactagatcgatggatgggcacccagctttcttgtacaaagtggttcgataaacactagtaacggccgccagtgtgctggaattcgcccttcccaagctttgctctagatcaaactcacatccaaacataacatggatatcttccttaccaatcatactaattattttgggttaaatattaatcattatttttaagatattaattaagaaattaaaagattttttaaaaaaatgtataaaattatattattcatgatttttcatacatttgattttgataataaatatattttttttaatttcttaaaaaatgttgcaagacacttattagacatagtcttgttctgtttacaaaagcattcatcatttaatacattaaaaaatatttaatactaacagtagaatcttcttgtgagtggtgtgggagtaggcaacctggcattgaaacgagagaaagagagtcagaaccagaagacaaataaaaagtatgcaacaaacaaatcaaaatcaaagggcaaaggctggggttggctcaattggttgctacattcaattttcaactcagtcaacggttgagattcactctgacttccccaatctaagccgcggatgcaaacggttgaatctaacccacaatccaatctcgttacttaggggcttttccgtcattaactcacccctgccacccggtttccctataaattggaactcaatgctcccctctaaactcgtatcgcttcagagttgagaccaagacacactcgttcatatatctctctgctcttctcttctcttctacctctcaaggtacttttcttctccctctaccaaatcctagattccgtggttcaatttcggatcttgcacttctggtttgctttgccttgctttttcctcaactgggtccatctaggatccatgtgaaactctactctttctttaatatctgcggaatacgcgtttgactttcagatctagtcgaaatcatttcataattgcctttctttcttttagcttatgagaaataaaatcactttttttttatttcaaaataaaccttgggccttgtgctgactgagatggggtttggtgattacagaattttagcgaattttgtaattgtacttgtttgtctgtagttttgttttgttttcttgtttctcatacattccttaggcttcaattttattcgagtataggtcacaataggaattcaaactttgagcaggggaattaatcccttccttcaaatccagtttgtttgtatatatgtttaaaaaatgaaacttttgctttaaattctattataactttttttatggctgaaatttttgcatgtgtctttgctctctgttgtaaatttactgtttaggtactaactctaggcttgttgtgcagtttttgaagtataacaacagaagttcctattccgaagttcctattctctagaaagtataggaacttccaccacacaacacaatggcggccaccgcttccagaaccacccgattctcttcttcctcttcacaccccaccttccccaaacgcattactagatccaccctccctctctctcatcaaaccctcaccaaacccaaccacgctctcaaaatcaaatgttccatctccaaaccccccacggcggcgcccttcaccaaggaagcgccgaccacggagcccttcgtgtcacggttcgcctccggcgaacctcgcaagggcgcggacatccttgtggaggcgctggagaggcagggcgtgacgacggtgttcgcgtaccccggcggtgcgtcgatggagatccaccaggcgctcacgcgctccgccgccatccgcaacgtgctcccgcgccacgagcagggcggcgtcttcgccgccgaaggctacgcgcgttcctccggcctccccggcgtctgcattgccacctccggccccggcgccaccaacctcgtgagcggcctcgccgacgctttaatggacagcgtcccagtcgtcgccatcaccggccaggtcgcccgccggatgatcggcaccgacgccttccaagaaaccccgatcgtggaggtgagcagatccatcacgaagcacaactacctcatcctcgacgtcgacgacatcccccgcgtcgtcgccgaggctttcttcgtcgccacctccggccgccccggtccggtcctcatcgacattcccaaagacgttcagcagcaactcgccgtgcctaattgggacgagcccgttaacctccccggttacctcgccaggctgcccaggccccccgccgaggcccaattggaacacattgtcagactcatcatggaggcccaaaagcccgttctctacgtcggcggtggcagtttgaattccagtgctgaattgaggcgctttgttgaactcactggtattcccgttgctagcactttaatgggtcttggaacttttcctattggtgatgaatattcccttcagatgctgggtatgcatggtactgtttatgctaactatgctgttgacaatagtgatttgttgcttgcctttggggtaaggtttgatgaccgtgttactgggaagcttgaggcttttgctagtagggctaagattgttcacattgatattgattctgccgagattgggaagaacaagcaggcgcacgtgtcggtttgcgcggatttgaagttggccttgaagggaattaatatgattttggaggagaaaggagtggagggtaagtttgatcttggaggttggagagaagagattaatgtgcagaaacacaagtttccattgggttacaagacattccaggacgcgatttctccgcagcatgctatcgaggttcttgatgagttgactaatggagatgctattgttagtactggggttgggcagcatcaaatgtgggctgcgcagttttacaagtacaagagaccgaggcagtggttgacctcagggggtcttggagccatgggttttggattgcctgcggctattggtgctgctgttgctaaccctggggctgttgtggttgacattgatggggatggtagtttcatcatgaatgttcaggagttggccactataagagtggagaatctcccagttaagatattgttgttgaacaatcagcatttgggtatggtggttcagttggaggataggttctacaagtccaatagagctcacacctatcttggagatccgtctagcgagagcgagatattcccaaacatgctcaagtttgctgatgcttgtgggataccggcagcgcgagtgacgaagaaggaagagcttagagcggcaattcagagaatgttggacacccctggcccctaccttcttgatgtcattgtgccccatcaggagcatgtgttgccgatgattcccagtaatggatccttcaaggatgtgataactgagggtgatggtagaacgaggtactgattgcctagaccaaatgttccttgatgcttgttttgtacaatatatataagataatgctgtcctagttgcaggatttggcctgtggtgagcatcatagtctgtagtagttttggtagcaagacattttattttccttttatttaacttactacatgcagtagcatctatctatctctgtagtctgatatctcctgttgtctgtattgtgccgttggattttttgctgtagtgagactgaaaatgatgtgctagtaataatatttctgttagaaatctaagtagagaatctgttgaagaagtcaaaagctaatggaatcaggttacatattcaatgtttttctttttttagcggttggtagacgtgtagattcaacttctcttggagctcacctaggcaatcagtaaaatgcatattccttttttaacttgccatttatttacttttagtggaaattgtgaccaatttgttcatgtagaacggatttggaccattgcgtccacaaaacgtctcttttgctcgatcttcacaaagcgataccgaaatccagagatagttttcaaaagtcagaaatggcaaagttataaatagtaaaacagaatagatgctgtaatcgacttcaataacaagtggcatcacgtttctagttctagacccatcagctgggccggcccagctgatgatcccggtgaagttcctattccgaagttcctattctccagaaagtataggaacttcactagagcttgcggccgcgcatgctgacttaatcagctaacgccactcgagggggggcccggtaccgg

SEQ ID NO: 846 - DNA, 8201 bp, Artificial Sequence
  synthetic construct; PHPA
cgcgccggtacccgggtaccgagctcactagacgcggtgaaattacctaattaacaccggtgtttatcaaacaagtttgtacaaaaaagcaggctccggccagaatggcccggaccgggttaccgaattctagaaatccgtcaacatggtggagcacgacactctcgtctactccaagaatatcaaagatacagtctcagaagaccaaagggctattgagacttttcaacaaagggtaatatcgggaaacctcctcggattccattgcccagctatctgtcacttcatcaaaaggacagtagaaaaggaaggtggcacctacaaatgccatcattgcgataaaggaaaggctatcgttcaagatgcctctgccgacagtggtcccaaagatggacccccacccacgaggagcatcgtggaaaaagaagacgttccaaccacgtcttcaaagcaagtggattgatgtgatatctccactgacgtaagggatgacgcacaatcccactagactctatcagtgatagagtgtatataagactctatcagtgatagagtgaactctatcagtgatagagttgtacttatttttacaacaattaccaacaacaacaaacaacaaacaacattacaattactatttacaattacagtcgacatggcctcctccgaggacgtcatcaaggagttcatgcgcttcaaggtgcgcatggagggctccgtgaacggccacgagttcgagatcgagggcgagggcgagggccgcccctacgagggcacccagaccgccaagctgaaggtgaccaagggcggccccctgcccttcgcctgggacatcctgtccccccagttccagtacggctccaaggtgtacgtgaagcaccccgccgacatccccgactacaagaagctgtccttccccgagggcttcaagtgggagcgcgtgatgaacttcgaggacggcggcgtggtgaccgtgacccaggactcctccctgcaggacggctccttcatctacaaggtgaagttcatcggcgtgaacttcccctccgacggccccgtaatgcagaagaagactatgggctgggaggcctccaccgagcgcctgtacccccgcgacggcgtgctgaagggcgagatccacaaggccctgaagctgaaggacggcggccactacctggtggagttcaagtccatctacatggccaagaagcccgtgcagctgcccggctactactacgtggactccaagctggacatcacctcccacaacgaggactacaccatcgtggagcagtacgagcgcgccgagggccgccaccacctgttcctgtagcggccccgctgaaatcaccagtctctctctacaaatctatctctctctataataatgtgtgagtagttcccagataagggaattagggttcttatagggtttcgctcatgtgttgagcatataagaaacccttagtatgtatttgtatttgtaaaatacttctatcaataaaatttctaattcctaaaaccaaaatccagtggcgagctcgagtctagacccgggtttacttattttgtgggtatctatacttttattagatttttaatcaggctcctgatttctttttatttcgattgaattcctgaacttgtattattcagtagatcgaataaattataaaaagataaaatcataaaataatattttatcctatcaatcatattaaagcaatgaatatgtaaaattaatcttatctttattttaaaaaatcatataggtttagtatttttttaaaaataaagataggattagttttactattcactgcttattacttttaaaaaaatcataaaggtttagtatttttttaaaataaatataggaatagttttactattcactgctttaatagaaaaatagtttaaaatttaagatagttttaatcccagcatttgccacgtttgaacgtgagccgaaacgatgtcgttacattatcttaacctagctgaaacgatgtcgtcataatatcgccaaatgccaactggactacgtcgaacccacaaatcccacaaagcgcgtgaaatcaaatcgctcaaaccacaaaaaagaacaacgcgtttgttacacgctcaatcccacgcgagtagagcacagtaaccttcaaataagcgaatggggcataatcagaaatccgaaataaacctaggggcattatcggaaatgaaaagtagctcactcaatataaaaatctaggaaccctagttttcgttatcactctgtgctccctcgctctatttctcagtctctgtgtttgcggctgaggattccgaacgagtgaccttcttcgtttctcgcaaaggtaacagcctctgctcttgtctcttcgattcgatctatgcctgtctcttatttacgatgatgtttcttcggttatgtttttttatttatgctttatgctgttgatgttcggttgtttgtttcgctttgtttttgtggttcagttttttaggattcttttggtttttgaatcgattaatcggaagagattttcgagttatttggtgtgttggaggtgaatcttttttttgaggtcatagatctgttgtatttgtgttataaacatgcgactttgtatgattttttacgaggttatgatgttctggttgttttattatgaatctgttgagacagaaccatgatttttgttgatgttcgtttacactattaaaggtttgttttaacaggattaaaagttttttaagcatgttgaaggagtcttgtagatatgtaaccgtcgatagtttttttgtgggtttgttcacatgttatcaagcttaatcttttactatgtatgcgaccatatctggatccagcaaaggcgattttttaattccttgtgaaacttttgtaatatgaagttgaaattttgttattggtaaactataaatgtgtgaagttggagtatacctttaccttcttatttggctttgtgatagtttaatttatatgtattttgagttctgacttgtatttctttgaattgattctagtttaagtaatccatggccagactcgacaagagcaaggtgatcaacagcgcactggagctgctgaacgaggtcggaatcgaaggcctcacaacccgtaagctcgcccagaagctcggggttgagcagcctacattgtactggcacgtcaagaacaagcgagctctgctagacgctatggccattgagatgctcgatcgccacgctatacacttgttacccttggaaggggaaagctggcaagacttcttgaggaacaacgctaagtccatgagatgcgctttgctcagtcaccgtgatggagccaaggtctgtctaggtacgggcttcacggagcaacaatatgaaactgcggagaaccgccttgccttcctgacacaacaaggtttctcccttgagaacgccctctacgcatggcaagcagtggggatctacactctgggttgtgtcttgctggatcaagagctgcaagtcgctaaggaggagagggaaacacctactactgatagtatgccgccactggttcgacaagctctggaactcaaggatcaccaaggtgcagagccagccttcctgttcggccttgaactgatcataggcggattggagaagcagctgaagagtgaaagtgggtcttaatgataggcggccgctaaagaaggagtgcgtcgaagcagatcgttcaaacatttggcaataaagtttcttaagattgaatcctgttgccggtcttgcgatgattatcatataatttctgttgaattacgttaagcatgtaataattaacatgtaatgcatgacgttatttatgagatgggtttttatgattagagtcccgcaattatacatttaatacgcgatagaaaacaaaatatagcgcgcaaactaggataaattatcgcgcgcggtgtcatctatgttactagatcgatggatgggcacccagctttcttgtacaaagtggttcgataaacactagtaacggccgccagtgtgctggaattcgcccttcccaagctttgctctagatcaaactcacatccaaacataacatggatatcttccttaccaatcatactaattattttgggttaaatattaatcattatttttaagatattaattaagaaattaaaagattttttaaaaaaatgtataaaattatattattcatgatttttcatacatttgattttgataataaatatattttttttaatttcttaaaaaatgttgcaagacacttattagacatagtcttgttctgtttacaaaagcattcatcatttaatacattaaaaaatatttaatactaacagtagaatcttcttgtgagtggtgtgggagtaggcaacctggcattgaaacgagagaaagagagtcagaaccagaagacaaataaaaagtatgcaacaaacaaatcaaaatcaaagggcaaaggctggggttggctcaattggttgctacattcaattttcaactcagtcaacggttgagattcactctgacttccccaatctaagccgcggatgcaaacggttgaatctaacccacaatccaatctcgttacttaggggcttttccgtcattaactcacccctgccacccggtttccctataaattggaactcaatgctcccctctaaactcgtatcgcttcagagttgagaccaagacacactcgttcatatatctctctgctcttctcttctcttctacctctcaaggtacttttcttctccctctaccaaatcctagattccgtggttcaatttcggatcttgcacttctggtttgctttgccttgctttttcctcaactgggtccatctaggatccatgtgaaactctactctttctttaatatctgcggaatacgcgtttgactttcagatctagtcgaaatcatttcataattgcctttctttcttttagcttatgagaaataaaatcactttttttttatttcaaaataaaccttgggccttgtgctgactgagatggggtttggtgattacagaattttagcgaattttgtaattgtacttgtttgtctgtagttttgttttgttttcttgtttctcatacattccttaggcttcaattttattcgagtataggtcacaataggaattcaaactttgagcaggggaattaatcccttccttcaaatccagtttgtttgtatatatgtttaaaaaatgaaacttttgctttaaattctattataactttttttatggctgaaatttttgcatgtgtctttgctctctgttgtaaatttactgtttaggtactaactctaggcttgttgtgcagtttttgaagtataacaacagaagttcctattccgaagttcctattctctagaaagtataggaacttccaccacacaacacaatggcggccaccgcttccagaaccacccgattctcttcttcctcttcacaccccaccttccccaaacgcattactagatccaccctccctctctctcatcaaaccctcaccaaacccaaccacgctctcaaaatcaaatgttccatctccaaaccccccacggcggcgcccttcaccaaggaagcgccgaccacggagcccttcgtgtcacggttcgcctccggcgaacctcgcaagggcgcggacatccttgtggaggcgctggagaggcagggcgtgacgacggtgttcgcgtaccccggcggtgcgtcgatggagatccaccaggcgctcacgcgctccgccgccatccgcaacgtgctcccgcgccacgagcagggcggcgtcttcgccgccgaaggctacgcgcgttcctccggcctccccggcgtctgcattgccacctccggccccggcgccaccaacctcgtgagcggcctcgccgacgctttaatggacagcgtcccagtcgtcgccatcaccggccaggtcgcccgccggatgatcggcaccgacgccttccaagaaaccccgatcgtggaggtgagcagatccatcacgaagcacaactacctcatcctcgacgtcgacgacatcccccgcgtcgtcgccgaggctttcttcgtcgccacctccggccgccccggtccggtcctcatcgacattcccaaagacgttcagcagcaactcgccgtgcctaattgggacgagcccgttaacctccccggttacctcgccaggctgcccaggccccccgccgaggcccaattggaacacattgtcagactcatcatggaggcccaaaagcccgttctctacgtcggcggtggcagtttgaattccagtgctgaattgaggcgctttgttgaactcactggtattcccgttgctagcactttaatgggtcttggaacttttcctattggtgatgaatattcccttcagatgctgggtatgcatggtactgtttatgctaactatgctgttgacaatagtgatttgttgcttgcctttggggtaaggtttgatgaccgtgttactgggaagcttgaggcttttgctagtagggctaagattgttcacattgatattgattctgccgagattgggaagaacaagcaggcgcacgtgtcggtttgcgcggatttgaagttggccttgaagggaattaatatgattttggaggagaaaggagtggagggtaagtttgatcttggaggttggagagaagagattaatgtgcagaaacacaagtttccattgggttacaagacattccaggacgcgatttctccgcagcatgctatcgaggttcttgatgagttgactaatggagatgctattgttagtactggggttgggcagcatcaaatgtgggctgcgcagttttacaagtacaagagaccgaggcagtggttgacctcagggggtcttggagccatgggttttggattgcctgcggctattggtgctgctgttgctaaccctggggctgttgtggttgacattgatggggatggtagtttcatcatgaatgttcaggagttggccactataagagtggagaatctcccagttaagatattgttgttgaacaatcagcatttgggtatggtggttcagttggaggataggttctacaagtccaatagagctcacacctatcttggagatccgtctagcgagagcgagatattcccaaacatgctcaagtttgctgatgcttgtgggataccggcagcgcgagtgacgaagaaggaagagcttagagcggcaattcagagaatgttggacacccctggcccctaccttcttgatgtcattgtgccccatcaggagcatgtgttgccgatgattcccagtaatggatccttcaaggatgtgataactgagggtgatggtagaacgaggtactgattgcctagaccaaatgttccttgatgcttgttttgtacaatatatataagataatgctgtcctagttgcaggatttggcctgtggtgagcatcatagtctgtagtagttttggtagcaagacattttattttccttttatttaacttactacatgcagtagcatctatctatctctgtagtctgatatctcctgttgtctgtattgtgccgttggattttttgctgtagtgagactgaaaatgatgtgctagtaataatatttctgttagaaatctaagtagagaatctgttgaagaagtcaaaagctaatggaatcaggttacatattcaatgtttttctttttttagcggttggtagacgtgtagattcaacttctcttggagctcacctaggcaatcagtaaaatgcatattccttttttaacttgccatttatttacttttagtggaaattgtgaccaatttgttcatgtagaacggatttggaccattgcgtccacaaaacgtctcttttgctcgatcttcacaaagcgataccgaaatccagagatagttttcaaaagtcagaaatggcaaagttataaatagtaaaacagaatagatgctgtaatcgacttcaataacaagtggcatcacgtttctagttctagacccatcagctgggccggcccagctgatgatcccggtgaagttcctattccgaagttcctattctccagaaagtataggaacttcactagagcttgcggccgcgcatgctgacttaatcagctaacgccactcgagggggggcccggtaccgg

SEQ ID NO: 847 - DNA, 14225 bp, Artificial Sequence
  synthetic construct containing artificial microRNA
cgcgccggtacccgggtaccgagctcactagacgcggtgaaattacctaattaacaccggtgtttatcaaacaagtttgtacaaaaaagcaggctccggccagaatggcccggaccgggttaccgaattctagaaatccgtcaacatggtggagcacgacactctcgtctactccaagaatatcaaagatacagtctcagaagaccaaagggctattgagacttttcaacaaagggtaatatcgggaaacctcctcggattccattgcccagctatctgtcacttcatcaaaaggacagtagaaaaggaaggtggcacctacaaatgccatcattgcgataaaggaaaggctatcgttcaagatgcctctgccgacagtggtcccaaagatggacccccacccacgaggagcatcgtggaaaaagaagacgttccaaccacgtcttcaaagcaagtggattgatgtgatatctccactgacgtaagggatgacgcacaatcccactagactctatcagtgatagagtgtatataagactctatcagtgatagagtgaactctatcagtgatagagttgtacttatttttacaacaattaccaacaacaacaaacaacaaacaacattacaattactatttacaattacagtcgacccgggatccaccatgtccaacctgctcacggttcaccagaaccttccggctcttccagtggacgcgacgtccgatgaagtcaggaagaacctcatggacatgttccgcgacaggcaagcgttcagcgagcacacctggaagatgctgctctccgtctgccgctcctgggctgcatggtgcaagctgaacaacaggaagtggttccccgctgagcccgaggacgtgagggattaccttctgtacctgcaagcgcgaggtttgtttctgcttctacctttgatatatatataataattatcattaattagtagtaatataatatttcaaatatttttttcaaaataaaagaatgtagtatatagcaattgcttttctgtagtttataagtgtgtatattttaatttataacttttctaatatatgaccaaaacatggtgatgcctaggtctggcagtgaagaccatccagcaacaccttggacaactgaacatgcttcacaggcgctccggcctcccgcgccccagcgactcgaacgccgtgagcctcgtcatgcgccgcatcaggaaggaaaacgtcgatgccggcgaaagggcaaagcaggccctcgcgttcgagaggaccgatttcgaccaggtccgcagcctgatggagaacagcgacaggtgccaggacattaggaacctggcgttcctcggaattgcatacaacacgctcctcaggatcgcggaaattgcccgcattcgcgtgaaggacattagccgcaccgacggcggcaggatgcttatccacattggcaggaccaagacgctcgtttccaccgcaggcgtcgaaaaggccctcagcctcggagtgaccaagctcgtcgaacgctggatctccgtgtccggcgtcgcggacgacccaaacaactacctcttctgccgcgtccgcaagaacggggtggctgcccctagcgccaccagccaactcagcacgagggccttggaaggtattttcgaggccacccaccgcctgatctacggcgcgaaggatgacagcggtcaacgctacctcgcatggtccgggcactccgcccgcgttggagctgctagggacatggcccgcgccggtgtttccatccccgaaatcatgcaggcgggtggatggacgaacgtgaacattgtcatgaactacattcgcaaccttgacagcgagacgggcgcaatggttcgcctcctggaagatggtgactgaggtacctaaagaaggagtgcgtcgaagcagatcgttcaaacatttggcaataaagtttcttaagattgaatcctgttgccggtcttgcgatgattatcatataatttctgttgaattacgttaagcatgtaataattaacatgtaatgcatgacgttatttatgagatgggtttttatgattagagtcccgcaattatacatttaatacgcgatagaaaacaaaatatagcgcgcaaactaggataaattatcgcgcgcggtgtcatctatgttactagatcggctcgactctagaggatcctcatcgctatcaactttgtatagaaaagttgggcccgaagttcctattccgaagttcctattctctagaaagtataggaacttcccataggattggcccggggctagcggatccttcgtccacagacatcaacatcttatcgtcctttgaagataagataataatgttgaagataagagtgggagccaccactaaaacattgctttgtcaaaagctaaaaaagatgatgcccgacagccacttgtgtgaagcatgagaagccggtccctccactaagaaaattagtgaagcatcttccagtggtccctccactcacagctcaatcagtgagcaacaggacgaaggaaatgacgtaagccatgacgtctaatcccacaagaatttccttatataaggaacacaaatcagaaggaagagatcaatcgaaatcaaaatcggaatcgaaatcaaaatcggaatcgaaatctctcatctaagatcactagtataacttcgtatagcatacattatacgaagttataagcttttacaagtttgtacaaaaaagcaggctccataggattggggccagaatggcccactcgacgatccaattccaatcccacaaaaatctgagcttaacagcacagttgctcctctcagagcagaatcgggtattcaacaccctcatatcaactactacgttgtgtataacggtccacatgccggtatatacgatgactggggttgtacaaaggcggcaacaaacggcgttcccggagttgcacacaagaaatttgccactattacagaggcaagagcagcagctgacgcgtacacaacaagtcagcaaacagacaggttgaacttcatccccaaaggagaagctcaactcaagcccaagagctttgctaaggccctaacaagcccaccaaagcaaaaagcccactggctcacgctaggaaccaaaaggcccagcagtgatccagccccaaaagagatctcctttgccccggagattacaatggacgatttcctctatctttacgatctaggaaggaagttcgaaggtgaaggtgacgacactatgttcaccactgataatgagaaggttagcctcttcaatttcagaaagaatgctgacccacagatggttagagaggcctacgcagcaggtctcatcaagacgatctacccgagtaacaatctccaggagatcaaataccttcccaagaaggttaaagatgcagtcaaaagattcaggactaattgcatcaagaacacagagaaagacatatttctcaagatcagaagtactattccagtatggacgattcaaggcttgcttcataaaccaaggcaagtaatagagattggagtctctaaaaaggtagttcctactgaatctaaggccatgcatggagtctaagattcaaatcgaggatctaacagaactcgccgtgaagactggcgaacagttcatacagagtcttttacgactcaatgacaagaagaaaatcttcgtcaacatggtggagcacgacactctggtctactccaaaaatgtcaaagatacagtctcagaagaccaaagggctattgagacttttcaacaaaggataatttcgggaaacctcctcggattccattgcccagctatctgtcacttcatcgaaaggacagtagaaaaggaaggtggctcctacaaatgccatcattgcgataaaggaaaggctatcattcaagatgcctctgccgacagtggtcccaaagatggacccccacccacgaggagcatcgtggaaaaagaagacgttccaaccacgtcttcaaagcaagtggattgatgtgacatctccactgacgtaagggatgacgcacaatcccactatccttcgcaagacccttcctctatataaggaagttcatttcatttggagaggacacgctcgagctcatttctctattacttcagccataacaaaagaactcttttctcttcttattaaaccatgaaaaagcctgaactcaccgcgacgtctgtcgagaagtttctgatcgaaaagttcgacagcgtctccgacctgatgcagctctcggagggcgaagaatctcgtgctttcagcttcgatgtaggagggcgtggatatgtcctgcgggtaaatagctgcgccgatggtttctacaaagatcgttatgtttatcggcactttgcatcggccgcgctcccgattccggaagtgcttgacattggggaattcagcgagagcctgacctattgcatctcccgccgtgcacagggtgtcacgttgcaagacctgcctgaaaccgaactgcccgctgttctgcagccggtcgcggaggccatggatgcgatcgctgcggccgatcttagccagacgagcgggttcggcccattcggaccgcaaggaatcggtcaatacactacatggcgtgatttcatatgcgcgattgctgatccccatgtgtatcactggcaaactgtgatggacgacaccgtcagtgcgtccgtcgcgcaggctctcgatgagctgatgctttgggccgaggactgccccgaagtccggcacctcgtgcacgcggatttcggctccaacaatgtcctgacggacaatggccgcataacagcggtcattgactggagcgaggcgatgttcggggattcccaatacgaggtcgccaacatcttcttctggaggccgtggttggcttgtatggagcagcagacgcgctacttcgagcggaggcatccggagcttgcaggatcgccgcggctccgggcgtatatgctccgcattggtcttgaccaactctatcagagcttggttgacggcaatttcgatgatgcagcttgggcgcagggtcgatgcgacgcaatcgtccgatccggagccgggactgtcgggcgtacacaaatcgcccgcagaagcgcggccgtctggaccgatggctgtgtagaagtactcgccgatagtggaaaccgacgccccagcactcgtccgagggcaaaggaatagtgaggtacctaaagaaggagtgcgtcgaagcagatcgttcaaacatttggcaataaagtttcttaagattgaatcctgttgccggtcttgcgatgattatcatataatttctgttgaattacgttaagcatgtaataattaacatgtaatgcatgacgttatttatgagatgggtttttatgattagagtcccgcaattatacatttaatacgcgatagaaaacaaaatatagcgcgcaaactaggataaattatcgcgcgcggtgtcatctatgttactagatcgatggtcggcctagaaggccacccagctttcttgtacaaagtggaactagtataacttcgtatagcatacattatacgaagttataagcttcaaaaaaaaaaaaaaccgcggccgcttctagctagctagggtttgggtagtgagtgtaataaagttgcaaagtttttggttaggttacgttttgaccttattattatagttcaaagggaaacattaattaaaggggattatgaagttcctcaacccaattccctcttgaggatcttactgggtgaattgagctgcttagctatggatcccacagttctacccatcaataagtgcttttgtggtagtcttgtggcttccatatctggggagcttcatttgcctttatagtattaaccttctgagggaaaagggttgaggaacacccttctcttcttttctctcataataatttaaatttgttatagactctaaactttaaatgttttttttgaagtttttccgtttttctcttttgccatgatcccgttcttgctgtggagtaaccttgtccgaggtatgtgcatgattagatccatacttaatttgtgtgcatcacgaaggtgaggttgaaatgaactttgcttttttgaccttttaggaaagttcttttgttgcagtaatcaattttaattagttttaattgacactattacttttattgtcatctttgttagttttattgttgaattgagtgcatatttcctaggaaattctcttacctaacattttttatacagatctatgctcttggctcttgcccttactcttggccttgtgttggttatttgtctacatatttattgactggtcgatgagacatgtcacaattcttgggcttatttgttggtctaataaaaggagtgcttattgaaagatcaagacggagattcggttttatataaataaactaaagatgacatattagtgtgttgatgtctcttcaggataatttttgtttgaaataatatggtaatgtcttgtctaaatttgtgtacataattcttactgattttttggattgttggatttttataaacaaatctgcggccgctagcgcgctgcagtggtaccttgatatctgcgcgcatctcgtctctgttatgcttaagaagttcaatgtttcgtttcatgtaaaactttggtggtttgtgttttggggccttgtataatccctgatgaataagtgttctactatgtttccgttcctgttatctctttctttctaatgacaagtcgaacttcttctttatcatcgcttcgtttttattatctgtgcttcttttgtttaatacgcctgcaaagtgactcgactctgtttagtgcagttctgcgaaacttgtaaatagtccaattgttggcctctagtaatagatgtagcgaaagtgttgagctgttgggttctaaggatggcttgaacatgttaatcttttaggttctgagtatgatgaacattcgttgttgctaagaaatgcctgtaatgtcccacaaatgtagaaaatggttcgtacctttgtccaagcattgatatgtctgatgagaggaaactgcaagatactgagcttggtttaacgaaggagaggcagtttcttccttccaaagcatttcatttgacaatgccttgatcatcttaagtagagtttctgttgtggaaagtttgaaactttgaagaaacgactctcaagtaaattgatgatcacaagtgaaagtgtatgttacataagtggatatttcaccctttttccatcaatcaaaacatcatatagtaatccattggtttatacaaacatcaaaatacatttacctctgaaatgaggaaaaaaatgcaaagagatttttgaaaatttccaacaaatggagagaaaaaaaaaaaacaaagaattaaatcaatcagtacatttataaaggttatgagacctatatgacacttattggtcaagtggcagccattccatttctagctctaattctggtcaccgaattcaggcctcctagggaagttcctattccgaagttcctattctccagaaagtataggaacttcgtcgagtctagacccgggtttacttattttgtgggtatctatacttttattagatttttaatcaggctcctgatttctttttatttcgattgaattcctgaacttgtattattcagtagatcgaataaattataaaaagataaaatcataaaataatattttatcctatcaatcatattaaagcaatgaatatgtaaaattaatcttatctttattttaaaaaatcatataggtttagtatttttttaaaaataaagataggattagttttactattcactgcttattacttttaaaaaaatcataaaggtttagtatttttttaaaataaatataggaatagttttactattcactgctttaatagaaaaatagtttaaaatttaagatagttttaatcccagcatttgccacgtttgaacgtgagccgaaacgatgtcgttacattatcttaacctagctgaaacgatgtcgtcataatatcgccaaatgccaactggactacgtcgaacccacaaatcccacaaagcgcgtgaaatcaaatcgctcaaaccacaaaaaagaacaacgcgtttgttacacgctcaatcccacgcgagtagagcacagtaaccttcaaataagcgaatggggcataatcagaaatccgaaataaacctaggggcattatcggaaatgaaaagtagctcactcaatataaaaatctaggaaccctagttttcgttatcactctgtgctccctcgctctatttctcagtctctgtgtttgcggctgaggattccgaacgagtgaccttcttcgtttctcgcaaaggtaacagcctctgctcttgtctcttcgattcgatctatgcctgtctcttatttacgatgatgtttcttcggttatgtttttttatttatgctttatgctgttgatgttcggttgtttgtttcgctttgtttttgtggttcagttttttaggattcttttggtttttgaatcgattaatcggaagagattttcgagttatttggtgtgttggaggtgaatcttttttttgaggtcatagatctgttgtatttgtgttataaacatgcgactttgtatgattttttacgaggttatgatgttctggttgttttattatgaatctgttgagacagaaccatgatttttgttgatgttcgtttacactattaaaggtttgttttaacaggattaaaagttttttaagcatgttgaaggagtcttgtagatatgtaaccgtcgatagtttttttgtgggtttgttcacatgttatcaagcttaatcttttactatgtatgcgaccatatctggatccagcaaaggcgattttttaattccttgtgaaacttttgtaatatgaagttgaaattttgttattggtaaactataaatgtgtgaagttggagtatacctttaccttcttatttggctttgtgatagtttaatttatatgtattttgagttctgacttgtatttctttgaattgattctagtttaagtaatccatggccagactcgacaagagcaaggtgatcaacagcgcactggagctgctgaacgaggtcggaatcgaaggcctcacaacccgtaagctcgcccagaagctcggggttgagcagcctacattgtactggcacgtcaagaacaagcgagctctgctagacgctatggccattgagatgctcgatcgccacgctatacacttgttacccttggaaggggaaagctggcaagacttcttgaggaacaacgctaagtccatgagatgcgctttgctcagtcaccgtgatggagccaaggtctgtctaggtacgggcttcacggagcaacaatatgaaactgcggagaaccgccttgccttcctgacacaacaaggtttctcccttgagaacgccctctacgcatggcaagcagtggggatctacactctgggttgtgtcttgctggatcaagagctgcaagtcgctaaggaggagagggaaacacctactactgatagtatgccgccactggttcgacaagctctggaactcaaggatcaccaaggtgcagagccagccttcctgttcggccttgaactgatcataggcggattggagaagcagctgaagagtgaaagtgggtcttaatgataggcggccgctaaagaaggagtgcgtcgaagcagatcgttcaaacatttggcaataaagtttcttaagattgaatcctgttgccggtcttgcgatgattatcatataatttctgttgaattacgttaagcatgtaataattaacatgtaatgcatgacgttatttatgagatgggtttttatgattagagtcccgcaattatacatttaatacgcgatagaaaacaaaatatagcgcgcaaactaggataaattatcgcgcgcggtgtcatctatgttactagatcgatggatgggcacccagctttcttgtacaaagtggttcgataaacactagtaacggccgccagtgtgctggaattcgcccttcccaagctttgctctagatcaaactcacatccaaacataacatggatatcttccttaccaatcatactaattattttgggttaaatattaatcattatttttaagatattaattaagaaattaaaagattttttaaaaaaatgtataaaattatattattcatgatttttcatacatttgattttgataataaatatattttttttaatttcttaaaaaatgttgcaagacacttattagacatagtcttgttctgtttacaaaagcattcatcatttaatacattaaaaaatatttaatactaacagtagaatcttcttgtgagtggtgtgggagtaggcaacctggcattgaaacgagagaaagagagtcagaaccagaagacaaataaaaagtatgcaacaaacaaatcaaaatcaaagggcaaaggctggggttggctcaattggttgctacattcaattttcaactcagtcaacggttgagattcactctgacttccccaatctaagccgcggatgcaaacggttgaatctaacccacaatccaatctcgttacttaggggcttttccgtcattaactcacccctgccacccggtttccctataaattggaactcaatgctcccctctaaactcgtatcgcttcagagttgagaccaagacacactcgttcatatatctctctgctcttctcttctcttctacctctcaaggtacttttcttctccctctaccaaatcctagattccgtggttcaatttcggatcttgcacttctggtttgctttgccttgctttttcctcaactgggtccatctaggatccatgtgaaactctactctttctttaatatctgcggaatacgcgtttgactttcagatctagtcgaaatcatttcataattgcctttctttcttttagcttatgagaaataaaatcactttttttttatttcaaaataaaccttgggccttgtgctgactgagatggggtttggtgattacagaattttagcgaattttgtaattgtacttgtttgtctgtagttttgttttgttttcttgtttctcatacattccttaggcttcaattttattcgagtataggtcacaataggaattcaaactttgagcaggggaattaatcccttccttcaaatccagtttgtttgtatatatgtttaaaaaatgaaacttttgctttaaattctattataactttttttatggctgaaatttttgcatgtgtctttgctctctgttgtaaatttactgtttaggtactaactctaggcttgttgtgcagtttttgaagtataacaacagaagttcctattccgaagttcctattctctagaaagtataggaacttccaccacacaacacaatggcggccaccgcttccagaaccacccgattctcttcttcctcttcacaccccaccttccccaaacgcattactagatccaccctccctctctctcatcaaaccctcaccaaacccaaccacgctctcaaaatcaaatgttccatctccaaaccccccacggcggcgcccttcaccaaggaagcgccgaccacggagcccttcgtgtcacggttcgcctccggcgaacctcgcaagggcgcggacatccttgtggaggcgctggagaggcagggcgtgacgacggtgttcgcgtaccccggcggtgcgtcgatggagatccaccaggcgctcacgcgctccgccgccatccgcaacgtgctcccgcgccacgagcagggcggcgtcttcgccgccgaaggctacgcgcgttcctccggcctccccggcgtctgcattgccacctccggccccggcgccaccaacctcgtgagcggcctcgccgacgctttaatggacagcgtcccagtcgtcgccatcaccggccaggtcgcccgccggatgatcggcaccgacgccttccaagaaaccccgatcgtggaggtgagcagatccatcacgaagcacaactacctcatcctcgacgtcgacgacatcccccgcgtcgtcgccgaggctttcttcgtcgccacctccggccgccccggtccggtcctcatcgacattcccaaagacgttcagcagcaactcgccgtgcctaattgggacgagcccgttaacctccccggttacctcgccaggctgcccaggccccccgccgaggcccaattggaacacattgtcagactcatcatggaggcccaaaagcccgttctctacgtcggcggtggcagtttgaattccagtgctgaattgaggcgctttgttgaactcactggtattcccgttgctagcactttaatgggtcttggaacttttcctattggtgatgaatattcccttcagatgctgggtatgcatggtactgtttatgctaactatgctgttgacaatagtgatttgttgcttgcctttggggtaaggtttgatgaccgtgttactgggaagcttgaggcttttgctagtagggctaagattgttcacattgatattgattctgccgagattgggaagaacaagcaggcgcacgtgtcggtttgcgcggatttgaagttggccttgaagggaattaatatgattttggaggagaaaggagtggagggtaagtttgatcttggaggttggagagaagagattaatgtgcagaaacacaagtttccattgggttacaagacattccaggacgcgatttctccgcagcatgctatcgaggttcttgatgagttgactaatggagatgctattgttagtactggggttgggcagcatcaaatgtgggctgcgcagttttacaagtacaagagaccgaggcagtggttgacctcagggggtcttggagccatgggttttggattgcctgcggctattggtgctgctgttgctaaccctggggctgttgtggttgacattgatggggatggtagtttcatcatgaatgttcaggagttggccactataagagtggagaatctcccagttaagatattgttgttgaacaatcagcatttgggtatggtggttcagttggaggataggttctacaagtccaatagagctcacacctatcttggagatccgtctagcgagagcgagatattcccaaacatgctcaagtttgctgatgcttgtgggataccggcagcgcgagtgacgaagaaggaagagcttagagcggcaattcagagaatgttggacacccctggcccctaccttcttgatgtcattgtgccccatcaggagcatgtgttgccgatgattcccagtaatggatccttcaaggatgtgataactgagggtgatggtagaacgaggtactgattgcctagaccaaatgttccttgatgcttgttttgtacaatatatataagataatgctgtcctagttgcaggatttggcctgtggtgagcatcatagtctgtagtagttttggtagcaagacattttattttccttttatttaacttactacatgcagtagcatctatctatctctgtagtctgatatctcctgttgtctgtattgtgccgttggattttttgctgtagtgagactgaaaatgatgtgctagtaataatatttctgttagaaatctaagtagagaatctgttgaagaagtcaaaagctaatggaatcaggttacatattcaatgtttttctttttttagcggttggtagacgtgtagattcaacttctcttggagctcacctaggcaatcagtaaaatgcatattccttttttaacttgccatttatttacttttagtggaaattgtgaccaatttgttcatgtagaacggatttggaccattgcgtccacaaaacgtctcttttgctcgatcttcacaaagcgataccgaaatccagagatagttttcaaaagtcagaaatggcaaagttataaatagtaaaacagaatagatgctgtaatcgacttcaataacaagtggcatcacgtttctagttctagacccatcagctgggccggcccagctgatgatcccggtgaagttcctattccgaagttcctattctccagaaagtataggaacttcactagagcttgcggccgcgcatgctgacttaatcagctaacgccactcgagggggggcccggtaccgg

SEQ ID NO: 848 - DNA, 19 bp, Artificial Sequence
  synthetic construct; Tet operatore sequence
actctatcagtgatagagt

SEQ ID NO: 849 - DNA, 1497 bp, Oryza sativa
tcaaatcttttttccatctacatccaatttatcatgtcaaagaaatggtctacatacagctaaggagatttatcgacgaatagtagctagcatactcgaggtcattcatatgcttgagaagagagtcgggatagtccaaaataaaacaaaggtaagattacctggtcaaaagtgaaaacatcagttaaaaggtggtataaagtaaaatatcggtaataaaaggtggcccaaagtgaaatttactcttttctactattataaaaattgaggatgtttttgtcggtactttgatacgtcatttttgtatgaattggtttttaagtttattcgcttttggaaatgcatatctgtatttgagtcgggttttaagttcgtttgcttttgtaaatacagagggatttgtataagaaatatctttaaaaaaacccatatgctaatttgacataatttttgagaaaaatatatattcaggcgaattctcacaatgaacaataataagattaaaatagctttcccccgttgcagcgcatgggtattttttctagtaaaaataaaagataaacttagactcaaaacatttacaaaaacaacccctaaagttcctaaagcccaaagtgctatccacgatccatagcaagcccagcccaacccaacccaacccaacccaccccagtccagccaactggacaatagtctccacacccccccactatcaccgtgagttgtccgcacgcaccgcacgtctcgcagccaaaaaaaaaaaaagaaagaaaaaaaagaaaaagaaaaaacagcaggtgggtccgggtcgtgggggccggaaacgcgaggaggatcgcgagccagcgacgaggccggccctccctccgcttccaaagaaacgccccccatcgccactatatacatacccccccctctcctcccatccccccaaccctaccaccaccaccaccaccacctccacctcctcccccctcgctgccggacgacgagctcctcccccctccccctccgccgccgccgcgccggtaaccaccccgcccctctcctctttctttctccgttttttttttccgtctcggtctcgatctttggccttggtagtttgggtgggcgagaggcggcttcgtgcgcgcccagatcggtgcgcgggaggggcgggatctcgcggctggggctctcgccggcgtggatccggcccggatctcgcggggaatggggctctcggatgtagatctgcgatccgccgttgttgggggagatgatggggggtttaaaatttccgccatgctaaacaagatcaggaagaggggaaaagggcactatggtttatatttttatatatttctgctgcttcgtcaggcttagatgtgctagatctttctttcttctttttgtgggtagaatttgaatccctcagcattgttcatcggtagtttttcttttcatgatttgtgacaaatgcagcctcgtgcggagcttttttgtaggtagaag

SEQ ID NO: 850 - DNA, 1053 bp, Badnavirus
gataaaaaggagttgatcataagaacagacagccaggccattgtagccttctacaagaagcaagcggatcacaagccttcaagaacgagatggcttatgttgattgattacattactgggctcggaatcaacgttaaatttgagcacattgacggaaaagaaaatgtcctagctgacactttatcaagattggtccaagttctaatcacaagggttcatcatccagcagagactcagctagttgaagccgtcatggaagtcctgagcaatccgaaaaaggaagccttggataaggtaaatcattttatctttctaacccaacaatggattgcagaacaaagaaaggagcatatggtgaacacactgctccagttggaagaacctcaactacactgcggctgcaaagatcacacaacaggagaaagaaggaacgccgttcttctccaaagtcacacctcagccaacccgtatagatggttctataagtgtgcacaagacagatgtcacacttggatttggaaggacatcctggaccagtatgctgaagattatgccgcttacaccaggattggacttgaggcacttagccttgaagactggttcgaagaaccagaacccgatccacctgacccagtggaccgccagaagatagaagatatcctggacctgcaagatgtcagcaatgacgattgaaagattcccaggatagccggcggacgtggtggacccagtctaggtgcgatgcttagtcacgcacgatgactctgtcggaaggcatctttactttcggcaaactttaataatactttaggaaaagtattgtacaagttaggtgcagaatcaataatgcacccagctttagtcttgtctactgaattattgtgtcggttgcattattggatgcctgcgtgcaccctaagcaatccccggctctcatctctataagaggagcctttgtattcagttgcaagcatgcaagtcacacactgcaagcttacttctgagcaaaaagagttttgagtgaaataaatttgaagttcccccttacatctt

SEQ ID NO: 851 - DNA, 384 bp, mirabilis mosaic virus
ttcgtccacagacatcaacatcttatcgtcctttgaagataagataataatgttgaagataagagtgggagccaccactaaaacattgctttgtcaaaagctaaaaaagatgatgcccgacagccacttgtgtgaagcatgagaagccggtccctccactaagaaaattagtgaagcatcttccagtggtccctccactcacagctcaatcagtgagcaacaggacgaaggaaatgacgtaagccatgacgtctaatcccacaagaatttccttatataaggaacacaaatcagaaggaagagatcaatcgaaatcaaaatcggaatcgaaatcaaaatcggaatcgaaatctctcatctaagagctcaaaaaaaaaaaaaacc

SEQ ID NO: 852 - DNA, 660 bp, mirabilis mosaic virus
ccaattcgtcaacttcgtccacagacatcaacatcttatcgtcctttgaagataagataataatgttgaagataagagtgggagcccccactaaaacattgctttgtcaaaagctaaaaaagatgatgcccgacagccacttgtgtgaagcatgagaagccggtccctccactaagaaaattagtgaagcatcttccagtggtccctccactcacagctcaatcagtgagcaacaggacgaaggaaatgacgtaagccatgacgtctaatcccaacttcgtccacagacatcaacatcttatcgtcctttgaagataagataataatgttgaagataagagtgggagccaccactaaaacattgctttgtcaaaagctaaaaaagatgatgcccgacagccacttgtgtgaagcatgagaagccggtccctccactaagaaaattagtgaagcatcttccagtggtccctccactcacagctcaatcagtgagcaacaggacgaaggaaatgacgtaagccatgacgtctaatcccacaagaatttccttatataaggaacacaaatcagaaggaagagatcaatcgaaatcaaaatcggaatcgaaatcaaaatcggaatcgaaatctctcatctaagagctcaaaaaaaaaaaaaacc

SEQ ID NO: 853 - DNA, 998 bp, Zea mays
gccatcatcaccctaccccgagctgactcgggccgcagggaaccagaccggtgtcccatctggctagctccgccagataggcaatgaaggcgccccgcatgctctgtgacgacggtggctctcatcccccttacggaagcaagaggacgtcagcaaggacccaaccgctccgacagttgtccctccgccaggctccatcgctcctccgacggccacgacatcgcaccagctgggtgccaaaatctctccggctgccacgacggcatgtacttagggcgctagctctcccccgctagacacgtagcactctgctacaccccccattgtacacctggatcctctccttacacctataaaaggaaggaccagggccctctcagagaaggttggccgcgcggggacgaggacgagacaggcgctcgcttggggccgctcgctccctctcccacgtggacgcttgtaaccccctactgcaagcgcacccgatctgggcgcgggacgaacacgaaggctgcgggattcccacctctctcacgccggtctccggccgcctcgctctccccccttcgcgctcgccctcgcgctcgatccatctgggctggggcacgcggcgacactcactcgtcggcccaagggacccccggtctcgaaacgccgacaatatgatatatagaaactataatgatacacatgcaattaactagtgctgataatatatttacactgtagatttttccgataagtagaaaccaaatatttcaccgccacaaaaggcttcatcccatcagttacccatgtagcaaaaccaaaatacttgtgtgcgagaggccaagagcccaaaccaccgccaaggaaacccccagcccaccaggcgccttcctctataaataccctaactccggtggccgaagttcctcacccattcactcactcatctcaaggcctaggtagcaccgtagcagctactagaagcagctagccagaacaactcgtccatg

SEQ ID NO: 854 - DNA, 1502 bp, Glycine max
gggtttacttattttgtgggtatctatacttttattagatttttaatcaggctcctgatttctttttatttcgattgaattcctgaacttgtattattcagtagatcgaataaattataaaaagataaaatcataaaataatattttatcctatcaatcatattaaagcaatgaatatgtaaaattaatcttatctttattttaaaaaatcatataggtttagtatttttttaaaaataaagataggattagttttactattcactgcttattacttttaaaaaaatcataaaggtttagtatttttttaaaataaatataggaatagttttactattcactgctttaatagaaaaatagtttaaaatttaagatagttttaatcccagcatttgccacgtttgaacgtgagccgaaacgatgtcgttacattatcttaacctagctgaaacgatgtcgtcataatatcgccaaatgccaactggactacgtcgaacccacaaatcccacaaagcgcgtgaaatcaaatcgctcaaaccacaaaaaagaacaacgcgtttgttacacgctcaatcccacgcgagtagagcacagtaaccttcaaataagcgaatggggcataatcagaaatccgaaataaacctaggggcattatcggaaatgaaaagtagctcactcaatataaaaatctaggaaccctagttttcgttatcactctgtgctccctcgctctatttctcagtctctgtgtttgcggctgaggattccgaacgagtgaccttcttcgtttctcgcaaaggtaacagcctctgctcttgtctcttcgattcgatctatgcctgtctcttatttacgatgatgtttcttcggttatgtttttttatttatgctttatgctgttgatgttcggttgtttgtttcgctttgtttttgtggttcagttttttaggattcttttggtttttgaatcgattaatcggaagagattttcgagttatttggtgtgttggaggtgaatcttttttttgaggtcatagatctgttgtatttgtgttataaacatgcgactttgtatgattttttacgaggttatgatgttctggttgttttattatgaatctgttgagacagaaccatgatttttgttgatgttcgtttacactattaaaggtttgttttaacaggattaaaagttttttaagcatgttgaaggagtcttgtagatatgtaaccgtcgatagtttttttgtgggtttgttcacatgttatcaagcttaatcttttactatgtatgcgaccatatctggatccagcaaaggcgattttttaattccttgtgaaacttttgtaatatgaagttgaaattttgttattggtaaactataaatgtgtgaagttggagtatacctttaccttcttatttggctttgtgatagtttaatttatatgtattttgagttctgacttgtatttctttgaattgattctagtttaagtaatcc

SEQ ID NO: 855 - DNA, 1497 bp, Artificial Sequence
  synthetic construct; actin promoter engineered with tet operators
tcaaatcttttttccatctacatccaatttatcatgtcaaagaaatggtctacatacagctaaggagatttatcgacgaatagtagctagcatactcgaggtcattcatatgcttgagaagagagtcgggatagtccaaaataaaacaaaggtaagattacctggtcaaaagtgaaaacatcagttaaaaggtggtataaagtaaaatatcggtaataaaaggtggcccaaagtgaaatttactcttttctactattataaaaattgaggatgtttttgtcggtactttgatacgtcatttttgtatgaattggtttttaagtttattcgcttttggaaatgcatatctgtatttgagtcgggttttaagttcgtttgcttttgtaaatacagagggatttgtataagaaatatctttaaaaaaacccatatgctaatttgacataatttttgagaaaaatatatattcaggcgaattctcacaatgaacaataataagattaaaatagctttcccccgttgcagcgcatgggtattttttctagtaaaaataaaagataaacttagactcaaaacatttacaaaaacaacccctaaagttcctaaagcccaaagtgctatccacgatccatagcaagcccagcccaacccaacccaacccaacccaccccagtccagccaactggacaatagtctccacacccccccactatcaccgtgagttgtccgcacgcaccgcacgtctcgcagccaaaaaaaaaaaaagaaagaaaaaaaagaaaaagaaaaaacagcaggtgggtccgggtcgtgggggccggaaacgcgaggaggatcgcgagccagcgacgaggccggccctccctccgcttccaactctatcagtgatagagtcactatatactctatcagtgatagagtcccatccccccaaccctaccactctatcagtgatagagtccacctcctcccccctcgctgccggacgacgagctcctcccccctccccctccgccgccgccgcgccggtaaccaccccgcccctctcctctttctttctccgttttttttttccgtctcggtctcgatctttggccttggtagtttgggtgggcgagaggcggcttcgtgcgcgcccagatcggtgcgcgggaggggcgggatctcgcggctggggctctcgccggcgtggatccggcccggatctcgcggggaatggggctctcggatgtagatctgcgatccgccgttgttgggggagatgatggggggtttaaaatttccgccatgctaaacaagatcaggaagaggggaaaagggcactatggtttatatttttatatatttctgctgcttcgtcaggcttagatgtgctagatctttctttcttctttttgtgggtagaatttgaatccctcagcattgttcatcggtagtttttcttttcatgatttgtgacaaatgcagcctcgtgcggagcttttttgtaggtagaag

SEQ ID NO: 856 - DNA, 1051 bp, Artificial Sequence
  synthetic construct; BSV promoter engineered with tet operators
gataaaaaggagttgatcataagaacagacagccaggccattgtagccttctacaagaagcaagcggatcacaagccttcaagaacgagatggcttatgttgattgattacattactgggctcggaatcaacgttaaatttgagcacattgacggaaaagaaaatgtcctagctgacactttatcaagattggtccaagttctaatcacaagggttcatcatccagcagagactcagctagttgaagccgtcatggaagtcctgagcaatccgaaaaaggaagccttggataaggtaaatcattttatctttctaacccaacaatggattgcagaacaaagaaaggagcatatggtgaacacactgctccagttggaagaacctcaactacactgcggctgcaaagatcacacaacaggagaaagaaggaacgccgttcttctccaaagtcacacctcagccaacccgtatagatggttctataagtgtgcacaagacagatgtcacacttggatttggaaggacatcctggaccagtatgctgaagattatgccgcttacaccaggattggacttgaggcacttagccttgaagactggttcgaagaaccagaacccgatccacctgacccagtggaccgccagaagatagaagatatcctggacctgcaagatgtcagcaatgacgattgaaagattcccaggatagccggcggacgtggtggacccagtctaggtgcgatgcttagtcacgcacgatgactctgtcggaaggcatctttactttcggcaaactttaataatactttaggaaaagtattgtacaagttaggtgcagaatcaataatgcacccagctttagtcttgtctactgaattattgtgtcggttgcattattggatgcctgcgtgcaccctaactctatcagtgatagagtctctataagactctatcagtgatagagtgcaactctatcagtgatagaggcaagcttacttctgagcaaaaagagttttgagtgaaataaatttgaagttcccccttacatctt

SEQ ID NO: 857 - DNA, 414 bp, Artificial Sequence
  synthetic construct; MMV promoter engineered with tet operators
ttcgtccacagacatcaacatcttatcgtcctttgaagataagataataatgttgaagataagagtgggagccaccactaaaacattgctttgtcaaaagctaaaaaagatgatgcccgacagccacttgtgtgaagcatgagaagccggtccctccactaagaaaattagtgaagcatcttccagtggtccctccactcacagctcaatcagtgagcaacaggacgaaggaaatgacgtaagccatgacgtctaatcccacactctatcagtgatagagtttatataagactctatcagtgatagagtgaactctatcagtgatagagtgagatcaatcgaaatcaaaatcggaatcgaaatcaaaatcggaatcgaaatctctcatctaagagctcaaaaaaaaaaaaaacc

SEQ ID NO: 858 - DNA, 693 bp, Artificial Sequence
  synthetic construct; dMMV promoter engineered with tet operators
aaaccaattcgtcaacttcgtccacagacatcaacatcttatcgtcctttgaagataagataataatgttgaagataagagtgggagcccccactaaaacattgctttgtcaaaagctaaaaaagatgatgcccgacagccacttgtgtgaagcatgagaagccggtccctccactaagaaaattagtgaagcatcttccagtggtccctccactcacagctcaatcagtgagcaacaggacgaaggaaatgacgtaagccatgacgtctaatcccaacttcgtccacagacatcaacatcttatcgtcctttgaagataagataataatgttgaagataagagtgggagccaccactaaaacattgctttgtcaaaagctaaaaaagatgatgcccgacagccacttgtgtgaagcatgagaagccggtccctccactaagaaaattagtgaagcatcttccagtggtccctccactcacagctcaatcagtgagcaacaggacgaaggaaatgacgtaagccatgacgtctaatcccacactctatcagtgatagagtttatataagactctatcagtgatagagtgaactctatcagtgatagagtgagatcaatcgaaatcaaaatcggaatcgaaatcaaaatcggaatcgaaatctctcatctaagagctcaaaaaaaaaaaaaacc

SEQ ID NO: 859 - DNA, 997 bp, Artificial Sequence
  synthetic construct; MP promoter engineered with tet operators
gggccatcatcaccctaccccgagctgactcgggccgcagggaaccagaccggtgtcccatctggctagctccgccagataggcaatgaaggcgccccgcatgctctgtgacgacggcggctctcagcccccttacggaagcaagaggacgtcagcaaggacccaaccgctccgacagctgtccctccgccaggctccatcgctcctccgacggccacgacatcgcaccagctgggtgccaaaatctctccggctgccacgacggcatgtacttagggcgctagctctcccccgctagacacgtagcactctgctacaccccccattgtacacctggatcctctccttacacctataaaaggaaggaccagggccctctcagagaaggttggccgcgcggggacgaggacgagacaggcgctcgcttggggccgctcgctccctctcccacgtggacgcttgtaaccccctactgcaagcgcacccgacctgggcgcgggacgaacacgaaggccgcgggattcccacctctctcacgccggtctccggccgcctcgctctccccccttcgcgctcgccctcgcgctcgatccatctaggctggggcacgcggcgacactcactcgtcggcccaagagacccccggtctcgaaacgccgacaatatgatatatagaaactataatgatacacatgcaattaactagtgctgataatatatttacactgtagatttttccgataagtagaaaccaaatatttcaccgccacaaaaggcttcatcccatcagttacccatgtagcaaaaccaaaatacttgtgtgcgagaggccaagagcccaaaccaccgccaaggaaacccccagcactctatcagtgatagagtataaatactctatcagtgatagagtaagttcctcacccattcactctatcagtgatagagttaggtagcaccgtagcagctactagaagcagctagccagagatccaccatg

SEQ ID NO: 860 - DNA, 1559 bp, Artificial Sequence
  synthetic construct; EFA promoter engineered with tet operators
gggtttacttattttgtgggtatctatacttttattagatttttaatcaggctcctgatttctttttatttcgattgaattcctgaacttgtattattcagtagatcgaataaattataaaaagataaaatcataaaataatattttatcctatcaatcatattaaagcaatgaatatgtaaaattaatcttatctttattttaaaaaatcatataggtttagtatttttttaaaaataaagataggattagttttactattcactgcttattacttttaaaaaaatcataaaggtttagtatttttttaaaataaatataggaatagttttactattcactgctttaatagaaaaatagtttaaaatttaagatagttttaatcccagcatttgccacgtttgaacgtgagccgaaacgatgtcgttacattatcttaacctagctgaaacgatgtcgtcataatatcgccaaatgccaactggactacgtcgaacccacaaatcccacaaagcgcgtgaaatcaaatcgctcaaaccacaaaaaagaacaacgcgtttgttacacgctcaatcccacgcgagtagagcacagtaaccttcaaataagcgaatggggcataatcagaaatccgaaataaacctaggggcattatcggaaatgaaaagtagctcactcaatataaaaatctaggaaccctagttttcgttatcactctatcagtgatagagtactctatcagtgatagagtactctgtgctccctcgctctatttctcagtctctgtgtttgcggctgaggattccgaacactctatcagtgatagagtgagtgaccttcttcgtttctcgcaaaggtaacagcctctgctcttgtctcttcgattcgatctatgcctgtctcttatttacgatgatgtttcttcggttatgtttttttatttatgctttatgctgttgatgttcggttgtttgtttcgctttgtttttgtggttcagttttttaggattcttttggtttttgaatcgattaatcggaagagattttcgagttatttggtgtgttggaggtgaatcttttttttgaggtcatagatctgttgtatttgtgttataaacatgcgactttgtatgattttttacgaggttatgatgttctggttgttttattatgaatctgttgagacagaaccatgatttttgttgatgttcgtttacactattaaaggtttgttttaacaggattaaaagttttttaagcatgttgaaggagtcttgtagatatgtaaccgtcgatagtttttttgtgggtttgttcacatgttatcaagcttaatcttttactatgtatgcgaccatatctggatccagcaaaggcgattttttaattccttgtgaaacttttgtaatatgaagttgaaattttgttattggtaaactataaatgtgtgaagttggagtatacctttaccttcttatttggctttgtgatagtttaatttatatgtattttgagttctgacttgtatttctttgaattgattctagtttaagtaatcc

SEQ ID NO: 861 - DNA, 933 bp, Artificial Sequence
  synthetic construct; S CaMV promoter with ADH intron
agaagaccaaagggcaattgagacttttcaacaaagggtaatatcgggaaacctcctcggattccattgcccagctatctgtcacttcatcaaaaggacagtagaaaaggaaggtggcacctacaaatgccatcattgcgataaaggaaaggctatcgttcaagatgcctctgccgacagtggtcccaaagatggacccccacccacgaggagcatcgtggaaaaagaagacgttccaaccacgtcttcaaagcaagtggattgatgtgatatctccactgacgtaagggatgacgcacaatcccactatccttcgcaagacccttcctctatataaggaagttcatttcatttggagaggacgacctgcaggtcgacggatcaagtgcaaaggtccgccttgtttctcctctgtctcttgatctgactaatcttggtttatgattcgttgagtaattttggggaaagcttcgtccacagtttttttttcgatgaacagtgccgcagtggcgctgatcttgtatgctatcctgcaatcgtggtgaacttatttcttttatatccttcactcccatgaaaaggctagtaatctttctcgatgtaacatcgtccagcactgctattaccgtgtggtccatccgacagtctggctgaacacatcatacgatattgagcaaagatcgatctatcttccctgttctttaatgaaagacgtcattttcatcagtatgatctaagaatgttgcaacttgcaaggaggcgtttctttctttgaatttaactaactcgttgagtggccctgtttctcggacgtaaggcctttgctgctccacacatgtccattcgaattttaccgtgtttagcaagggcgaaaagtttgcatcttgatgatttagcttgactatgcgattgctttcctggacccgtgcagcc

SEQ ID NO: 862 - DNA, 1093 bp, Artificial Sequence
  synthetic construct; SCaMV promoter engineered with tet operators
gaaaatcttcgtcaacatggtggagcacgacacgcttgtctactccaaaaatatcaaagatacagtctcagaagaccaaagggcaattgagacttttcaacaaagggtaatatccggaaacctcctcggattccattgcccagctatctgtcactttattgtgaagatagtggaaaaggaaggtggctcctacaaatgccatcattgcgataaaggaaaggccatcgttgaagatgcctctgccgacagtggtcccaaagatggacccccacccacgaggagcatcgtggaaaaagaagacgttccaaccacgtcttcaaagcaagtggattgatgtgatatctccactgacgtaagggatgacgcacaatcccactagactctatcagtgatagagtgtatataagactctatcagtgatagagtgaactctatcagtgatagagttgtacttatttttacaacaattaccaacaacaacaaacaacaaacaacattacaattactatttacaattacagtcgacggatcaagtgcaaaggtccgccttgtttctcctctgtctcttgatctgactaatcttggtttatgattcgttgagtaattttggggaaagcttcgtccacagtttttttttcgatgaacagtgccgcagtggcgctgatcttgtatgctatcctgcaatcgtggtgaacttatttcttttatatccttcactcccatgaaaaggctagtaatctttctcgatgtaacatcgtccagcactgctattaccgtgtggtccatccgacagtctggctgaacacatcatacgatattgagcaaagatcgatctatcttccctgttctttaatgaaagacgtcattttcatcagtatgatctaagaatgttgcaacttgcaaggaggcgtttctttctttgaatttaactaactcgttgagtggccctgtttctcggacgtaaggcctttgctgctccacacatgtccattcgaattttaccgtgtttagcaagggcgaaaagtttgcatcttgatgatttagcttgactatgcgattgctttcctggacccgtgcagctgcggacggatcc

SEQ ID NO: 863 - protein, 207 aa, Artificial Sequence
  synthetic construct; Sulfonylurea responsive repressor
MARLDKSKVINSALELLNEVGIEGLTTRKLAQKLGVEQPTLYWHVKNKRALLDAMAIEMFDRHATHYCPLEGESWQDFLRNKAKSMRNALLSHRDGAKVALGTGFTEQQYETAENCLAFLTQQGFSLENALYAFQAVGIYTLGCVLLDQELQVAKEERETPTTDSMPPLVRQAYELKDHQGAEPAFLFGLELIICGLEKQLKCESGS

SEQ ID NO: 864 - protein, 207 aa, Artificial Sequence
  synthetic construct; Sulfonylurea responsive repressor
MARLDKSKVINSALELLNEVGIEGLTTRKLAQKLGVEQPTLYWHVKNKRALLDAMAIEMLDPHKIHYLPLEGESWQDFLRNRAKSMRNALLSHRDGAKVCLGTGFTERQYETAENTLAFLTQQGFSLENALYAFQAVGIYTLGCVLLDQELQVAKEERETPTTDSMPPLVRQAYELADHQGAEPAFLFGLELIISGLEKQLKAESGS

SEQ ID NO: 865 - protein, 207 aa, Artificial Sequence
  synthetic construct; Sulfonylurea responsive repressor
MARLDKSKVINSALELLNEVGIEGLTTRKLAQKLGVEQPTLYWHVKNKRALLDEMAIEMLDPHKIHYLPLEGESWQDFLRNRAKSMRNALLSHRDGAKVCLGTGFTERQYETAENTLAFLTQQGFSLENALYAFQAVGIYTLGCVLLDQELQVAKEERETPTTDSMPPLVRQAYELADHQGAEPAFLFGLELIISGLEKQLKAESGS

SEQ ID NO: 866 - protein, 207 aa, Artificial Sequence
  synthetic construct; Sulfonylurea responsive repressor
MARLDKSKVINSALELLNEVGIEGLTTRKLAQKLGVEQPTLYWHVKNKRALLDAMAIEILDPHKIHYLPLEGESWQDFLRNRAKSMRNALLSHRDGAKVCLGTGFTERQYETAENTLAFLTQQGFSLENALYAFQAVGIYTLGCVLLDQELQVAKEERETPTTDSMPPLVRQVYELADHQDAEPAFLFGLELIISGLEKQLKAESGS

SEQ ID NO: 867 - protein, 207 aa, Artificial Sequence
  synthetic construct; Sulfonylurea responsive repressor
MARLDKSKVINSALELLNEVGIEGLTTRKLAQKLGVEQPTLYWHVKNKRALLDAMAIEMLDPHKIHYLPLEGESWQDYLRNRAKSMRNALLSHRDGAKVCLGTGFTERQYETAENTLAFLTQQGFSLENALYAFQAVGIYTLGCVLLDQELQVAKEERETPTTESMPPLVRQAYELADHQGTEPAFLFGLELIISGLEKQLKAESGS

SEQ ID NO: 868 - protein, 207 aa, Artificial Sequence
  synthetic construct; Sulfonylurea responsive repressor
MARLDKSKVINSALELGNEVGIEGLTTRKLAQKLGVEQPTLYWHVKNKRALLDALAIEMHDRHQTHYLPLEGESWQDFLRNFAKSMRLALLSHRDGAKVSLGTRWTEQQYETAENMLAFLTQQGFSLENALYATDAVRVFTLGAVLLDQEQQVAKEERETPTPDSMPPLLRQAWELKVHQGAEPAFLFGLELIIAGLEKQLKRESGS

SEQ ID NO: 869 - protein, 207 aa, Artificial Sequence
  synthetic construct; Sulfonylurea responsive repressor
MARLDKSKVINSALELLNEVGIEGLTTRKLAQKLGVEQPTLYWHVKNKRALLDALAIEMHDRHQTHYLPLEGESWQDFLRNFAKSMRRALLSHRDGAKVSLGTRWTEQQYETAENMLAFLTQQGFSLENALYATDAVRVFTLGAVLLDQEQQVAKEERETPTTDSMPPLLRQAWELKVHQGAEPAFLFGLELIIAGLEKQLKRESGS

SEQ ID NO: 870 - protein, 207 aa, Artificial Sequence
  synthetic construct; Sulfonylurea responsive repressor
MARLDKSKVINSALELLNEVGIEGLTTRKLAQKLGVEQPTLYWHVKNKRALLDALAIEMHDRHQTHYLPLEGESWQDFLRNFAKSMRLALLSHRDGAKVSLGTRWTEQQYETAENMLAFLTQQGFSLENALYATDAVRVFTLGAVLLDQEQQVAKEERETPTPDSMPPLLRQAWELKVHQGAEPAFLFGLELIIAGLEKQLKRESGS

SEQ ID NO: 871 - DNA, 35 bp, Artificial Sequence
  synthetic construct; Oligonucleotide
acacatctagaaaccatggccagactcgacaagag

SEQ ID NO: 872 - DNA, 43 bp, Artificial Sequence
  synthetic construct; Oligonucleotide
tgtgtaagcttgttggtacctcacttgtacagctcatccatgc

SEQ ID NO: 873 - DNA, 48 bp, Artificial Sequence
  synthetic construct; Oligonucleotide
ctgaagtgtgaaagtgggtctggatccgtgagcaagggcgccgagctg

SEQ ID NO: 874 - DNA, 48 bp, Artificial Sequence
  synthetic construct; Oligonucleotide
cagctcggcgcccttgctcacggatccagacccactttcacacttcag

SEQ ID NO: 875 - DNA, 33 bp, Artificial Sequence
  synthetic construct; Oligonucleotide
gctcacggatccagatccactttcacacttcag

SEQ ID NO: 876 - DNA, 33 bp, Artificial Sequence
  synthetic construct; Oligonucleotide
gctcacggatccagacccactttcggccttcag

SEQ ID NO: 877 - DNA, 33 bp, Artificial Sequence
  synthetic construct; Oligonucleotide
gctcacggatccagacccactttctctcttcag

SEQ ID NO: 878 - DNA, 38 bp, Artificial Sequence
  synthetic construct; Oligonucleotide
cgattccgacctcgttccccagctccagtgcgctgttg

SEQ ID NO: 879 - DNA, 38 bp, Artificial Sequence
  synthetic construct; Oligonucleotide
caacagcgcactggagctggggaacgaggtcggaatcg

SEQ ID NO: 880 - DNA, 35 bp, Artificial Sequence
  synthetic construct; Oligonucleotide
ctaggtggaccttggctcgatcacggtgactgagc

SEQ ID NO: 881 - DNA, 35 bp, Artificial Sequence
  synthetic construct; Oligonucleotide
gctcagtcaccgtgatcgagccaaggtccacctag

SEQ ID NO: 882 - DNA, 36 bp, Artificial Sequence
  synthetic construct; Oligonucleotide
gctgaacgaggtcggagacgaaggcctcacaacccg

SEQ ID NO: 883 - DNA, 36 bp, Artificial Sequence
  synthetic construct; Oligonucleotide
cgggttgtgaggccttcgtctccgacctcgttcagc

SEQ ID NO: 884 - protein, 207 aa, Artificial Sequence
  synthetic construct; Sulfonylurea responsive repressor
MARLDKSKVINSALELGNEVGIEGLTTRKLAQKLGVEQPTLYWHVKNKRALLDAMAIEMFDRHATHYCPLEGESWQDFLRNKAKSMRNALLSHRDGAKVALGTGFTEQQYETAENCLAFLTQQGFSLENALYAFQAVGIYTLGCVLLDQELQVAKEERETPTTDSMPPLVRQAYELKDHQGAEPAFLFGLELIICGLEKQLKCESGS

SEQ ID NO: 885 - protein, 207 aa, Artificial Sequence
  synthetic construct; Sulfonylurea responsive repressor
MARLDKSKVINSALELGNEVGIEGLTTRKLAQKLGVEQPTLYWHVKNKRALLDAMAIEMLDPHKIHYLPLEGESWQDFLRNRAKSMRNALLSHRDGAKVCLGTGFTERQYETAENTLAFLTQQGFSLENALYAFQAVGIYTLGCVLLDQELQVAKEERETPTTDSMPPLVRQAYELADHQGAEPAFLFGLELIISGLEKQLKAESGS

SEQ ID NO: 886 - protein, 207 aa, Artificial Sequence
  synthetic construct; Sulfonylurea responsive repressor
MARLDKSKVINSALELGNEVGIEGLTTRKLAQKLGVEQPTLYWHVKNKRALLDEMAIEMLDPHKIHYLPLEGESWQDFLRNRAKSMRNALLSHRDGAKVCLGTGFTERQYETAENTLAFLTQQGFSLENALYAFQAVGIYTLGCVLLDQELQVAKEERETPTTDSMPPLVRQAYELADHQGAEPAFLFGLELIISGLEKQLKAESGS

SEQ ID NO: 887 - protein, 207 aa, Artificial Sequence
  synthetic construct; Sulfonylurea responsive repressor
MARLDKSKVINSALELGNEVGIEGLTTRKLAQKLGVEQPTLYWHVKNKRALLDAMAIEILDPHKIHYLPLEGESWQDFLRNRAKSMRNALLSHRDGAKVCLGTGFTERQYETAENTLAFLTQQGFSLENALYAFQAVGIYTLGCVLLDQELQVAKEERETPTTDSMPPLVRQVYELADHQDAEPAFLFGLELIISGLEKQLKAESGS

SEQ ID NO: 888 - protein, 207 aa, Artificial Sequence
  synthetic construct; Sulfonylurea responsive repressor
MARLDKSKVINSALELGNEVGIEGLTTRKLAQKLGVEQPTLYWHVKNKRALLDAMAIEMLDPHKIHYLPLEGESWQDYLRNRAKSMRNALLSHRDGAKVCLGTGFTERQYETAENTLAFLTQQGFSLENALYAFQAVGIYTLGCVLLDQELQVAKEERETPTTESMPPLVRQAYELADHQGTEPAFLFGLELIISGLEKQLKAESGS

SEQ ID NO: 889 - protein, 207 aa, Artificial Sequence
  synthetic construct; Sulfonylurea responsive repressor
MARLDKSKVINSALELGNEVGIEGLTTRKLAQKLGVEQPTLYWHVKNKRALLDALAIEMHDRHQTHYLPLEGESWQDFLRNFAKSMRRALLSHRDGAKVSLGTRWTEQQYETAENMLAFLTQQGFSLENALYATDAVRVFTLGAVLLDQEQQVAKEERETPTTDSMPPLLRQAWELKVHQGAEPAFLFGLELIIAGLEKQLKRESGS

SEQ ID NO: 890 - DNA, 42 bp, Artificial Sequence
  synthetic construct; Oligonucleotide
tggcacgtcaagaacaagcgagctctgctagacgctatggcc

SEQ ID NO: 891 - DNA, 42 bp, Artificial Sequence
  synthetic construct; Oligonucleotide
atcgagatgctcgatcsccacgctatacactwcttacycttg

SEQ ID NO: 892 - DNA, 42 bp, Artificial Sequence
  synthetic construct; Oligonucleotide
ttcgagatgctcgatcsccacgctatacactwcttacycttg

SEQ ID NO: 893 - DNA, 42 bp, Artificial Sequence
  synthetic construct; Oligonucleotide
atcgagatgctcgatcsccacgctatacactwcwgtcycttg

SEQ ID NO: 894 - DNA, 42 bp, Artificial Sequence
  synthetic construct; Oligonucleotide
ttcgagatgctcgatcsccacgctatacactwcwgtcycttg

SEQ ID NO: 895 - DNA, 42 bp, Artificial Sequence
  synthetic construct; Oligonucleotide
atcgagatgctcgatcsccacgctatacacttgttacycttg

SEQ ID NO: 896 - DNA, 42 bp, Artificial Sequence
  synthetic construct; Oligonucleotide
ttcgagatgctcgatcsccacgctatacacttgttacycttg

SEQ ID NO: 897 - DNA, 42 bp, Artificial Sequence
  synthetic construct; Oligonucleotide
atcgagatgctcgatcsccacgctatacacttgwgtcycttg

SEQ ID NO: 898 - DNA, 42 bp, Artificial Sequence
  synthetic construct; Oligonucleotide
ttcgagatgctcgatcsccacgctatacacttgwgtcycttg

SEQ ID NO: 899 - DNA, 42 bp, Artificial Sequence
  synthetic construct; Oligonucleotide
atcgagatgctcgatcsccacgctmcccactwcttacycttg

SEQ ID NO: 900 - DNA, 42 bp, Artificial Sequence
  synthetic construct; Oligonucleotide
ttcgagatgctcgatcsccacgctmcccactwcttacycttg

SEQ ID NO: 901 - DNA, 42 bp, Artificial Sequence
  synthetic construct; Oligonucleotide
atcgagatgctcgatcsccacgctmcccactwcwgtcycttg

SEQ ID NO: 902 - DNA, 42 bp, Artificial Sequence
  synthetic construct; Oligonucleotide
ttcgagatgctcgatcsccacgctmcccactwcwgtcycttg

SEQ ID NO: 903 - DNA, 42 bp, Artificial Sequence
  synthetic construct; Oligonucleotide
atcgagatgctcgatcsccacgctmcccacttgttacycttg

SEQ ID NO: 904 - DNA, 42 bp, Artificial Sequence
  synthetic construct; Oligonucleotide
ttcgagatgctcgatcsccacgctmcccacttgttacycttg

SEQ ID NO: 905 - DNA, 42 bp, Artificial Sequence
  synthetic construct; Oligonucleotide
atcgagatgctcgatcsccacgctmcccacttgwgtcycttg

SEQ ID NO: 906 - DNA, 42 bp, Artificial Sequence
  synthetic construct; Oligonucleotide
ttcgagatgctcgatcsccacgctmcccacttgwgtcycttg

SEQ ID NO: 907 - DNA, 42 bp, Artificial Sequence
  synthetic construct; Oligonucleotide
gaaggggmaagctggcaagacttcttgaggaacaamgctaag

SEQ ID NO: 908 - DNA, 42 bp, Artificial Sequence
  synthetic construct; Oligonucleotide
tccatgagaaacgctttgctcagtcaccgtgatggagccaag

SEQ ID NO: 909 - DNA, 42 bp, Artificial Sequence
  synthetic construct; Oligonucleotide
tccatgagaygtgctttgctcagtcaccgtgatggagccaag

SEQ ID NO: 910 - DNA, 42 bp, Artificial Sequence
  synthetic construct; Oligonucleotide
gcgtgtctaggtacgggcttmacggagcaaaactatgaaact

SEQ ID NO: 911 - DNA, 42 bp, Artificial Sequence
  synthetic construct; Oligonucleotide
gtgtgtctaggtacgggcttmacggagcaaaactatgaaact

SEQ ID NO: 912 - DNA, 42 bp, Artificial Sequence
  synthetic construct; Oligonucleotide
gcgtgtctaggtacgggcttmacggagcaacaatatgaaact

SEQ ID NO: 913 - DNA, 42 bp, Artificial Sequence
  synthetic construct; Oligonucleotide
gtgtgtctaggtacgggcttmacggagcaacaatatgaaact

SEQ ID NO: 914 - DNA, 42 bp, Artificial Sequence
  synthetic construct; Oligonucleotide
acggagaacmgccttgccttcctgtgtcaacaaggtttctcc

SEQ ID NO: 915 - DNA, 42 bp, Artificial Sequence
  synthetic construct; Oligonucleotide
gcggagaacmgccttgccttcctgtgtcaacaaggtttctcc

SEQ ID NO: 916 - DNA, 42 bp, Artificial Sequence
  synthetic construct; Oligonucleotide
acggagaacmgccttgccttcctgacgcaacaaggtttctcc

SEQ ID NO: 917 - DNA, 42 bp, Artificial Sequence
  synthetic construct; Oligonucleotide
gcggagaacmgccttgccttcctgacgcaacaaggtttctcc

SEQ ID NO: 918 - DNA, 42 bp, Artificial Sequence
  synthetic construct; Oligonucleotide
cttgagaacgccctctacgcatggcaagacstggggatctac

SEQ ID NO: 919 - DNA, 42 bp, Artificial Sequence
  synthetic construct; Oligonucleotide
cttgagaacgccctctacgcatggcaakcastggggatctac

SEQ ID NO: 920 - DNA, 42 bp, Artificial Sequence
  synthetic construct; Oligonucleotide
cttgagaacgccctctacgcaatgcaagacstggggatctac

SEQ ID NO: 921 - DNA, 42 bp, Artificial Sequence
  synthetic construct; Oligonucleotide
cttgagaacgccctctacgcaatgcaakcastggggatctac

SEQ ID NO: 922 - DNA, 42 bp, Artificial Sequence
  synthetic construct; Oligonucleotide
actctgggttgsgygttgctggatcaagagctgcaagtcgct

SEQ ID NO: 923 - DNA, 42 bp, Artificial Sequence
  synthetic construct; Oligonucleotide
actctgggtkcggygttgctggatcaagagctgcaagtcgct

SEQ ID NO: 924 - DNA, 42 bp, Artificial Sequence
  synthetic construct; Oligonucleotide
aaggaggagagggaaacacctactactgatagtawgccgcca

SEQ ID NO: 925 - DNA, 42 bp, Artificial Sequence
  synthetic construct; Oligonucleotide
ctgrtacgacaagctctgaacctcaaggatcaccaaggtgca

SEQ ID NO: 926 - DNA, 42 bp, Artificial Sequence
  synthetic construct; Oligonucleotide
ctgrtacgacaagctctggaactcaaggatcaccaaggtgca

SEQ ID NO: 927 - DNA, 42 bp, Artificial Sequence
  synthetic construct; Oligonucleotide
gagcycgccttcctgttcggccttgaactgatcatagctgga

SEQ ID NO: 928 - DNA, 42 bp, Artificial Sequence
  synthetic construct; Oligonucleotide
gagcycgccttcctgttcggccttgaactgatcatahgcgga

SEQ ID NO: 929 - DNA, 42 bp, Artificial Sequence
  synthetic construct; Oligonucleotide
ttggagaagcagctgaaggctgaaagtgggtcttaatgatag

SEQ ID NO: 930 - DNA, 42 bp, Artificial Sequence
  synthetic construct; Oligonucleotide
ttggagaagcagctgaaghgtgaaagtgggtcttaatgatag

SEQ ID NO: 931 - DNA, 42 bp, Artificial Sequence
  synthetic construct; Oligonucleotide
gtggsgatcgagcatctcgawggccatagcgtctagcagagc

SEQ ID NO: 932 - DNA, 42 bp, Artificial Sequence
  synthetic construct; Oligonucleotide
gtcttgccagcttkccccttccaagrgtaagwagtgtatagc

SEQ ID NO: 933 - DNA, 42 bp, Artificial Sequence
  synthetic construct; Oligonucleotide
gtcttgccagcttkccccttccaagrgacwgwagtgtatagc

SEQ ID NO: 934 - DNA, 42 bp, Artificial Sequence
  synthetic construct; Oligonucleotide
gtcttgccagcttkccccttccaagrgtaacaagtgtatagc

SEQ ID NO: 935 - DNA, 42 bp, Artificial Sequence
  synthetic construct; Oligonucleotide
gtcttgccagcttkccccttccaagrgacwcaagtgtatagc

SEQ ID NO: 936 - DNA, 42 bp, Artificial Sequence
  synthetic construct; Oligonucleotide
gtcttgccagcttkccccttccaagrgtaagwagtgggkagc

SEQ ID NO: 937 - DNA, 42 bp, Artificial Sequence
  synthetic construct; Oligonucleotide
gtcttgccagcttkccccttccaagrgacwgwagtgggkagc

SEQ ID NO: 938 - DNA, 42 bp, Artificial Sequence
  synthetic construct; Oligonucleotide
gtcttgccagcttkccccttccaagrgtaacaagtgggkagc

SEQ ID NO: 939 - DNA, 42 bp, Artificial Sequence
  synthetic construct; Oligonucleotide
gtcttgccagcttkccccttccaagrgacwcaagtgggkagc

SEQ ID NO: 940 - DNA, 42 bp, Artificial Sequence
  synthetic construct; Oligonucleotide
gagcaaagcgtttctcatggacttagckttgttcctcaagaa

SEQ ID NO: 941 - DNA, 42 bp, Artificial Sequence
  synthetic construct; Oligonucleotide
gagcaaagcacrtctcatggacttagckttgttcctcaagaa

SEQ ID NO: 942 - DNA, 42 bp, Artificial Sequence
  synthetic construct; Oligonucleotide
gaagcccgtacctagacacrccttggctccatcacggtgact

SEQ ID NO: 943 - DNA, 42 bp, Artificial Sequence
  synthetic construct; Oligonucleotide
taagcccgtacctagacacrccttggctccatcacggtgact

SEQ ID NO: 944 - DNA, 42 bp, Artificial Sequence
  synthetic construct; Oligonucleotide
gaaggcaaggckgttctccgyagtttcatagttttgctccgt

SEQ ID NO: 945 - DNA, 42 bp, Artificial Sequence
  synthetic construct; Oligonucleotide
gaaggcaaggckgttctccgyagtttcatattgttgctccgt

SEQ ID NO: 946 - DNA, 42 bp, Artificial Sequence
  synthetic construct; Oligonucleotide
tgcgtagagggcgttctcaagggagaaaccttgttgacacag

SEQ ID NO: 947 - DNA, 42 bp, Artificial Sequence
  synthetic construct; Oligonucleotide
tgcgtagagggcgttctcaagggagaaaccttgttgcgtcag

SEQ ID NO: 948 - DNA, 42 bp, Artificial Sequence
  synthetic construct; Oligonucleotide
cagcaacrcscaacccagagtgtagatccccasgtcttgcca

SEQ ID NO: 949 - DNA, 42 bp, Artificial Sequence
  synthetic construct; Oligonucleotide
cagcaacrccgmacccagagtgtagatccccasgtcttgcca

SEQ ID NO: 950 - DNA, 42 bp, Artificial Sequence
  synthetic construct; Oligonucleotide
cagcaacrcscaacccagagtgtagatccccastgmttgcca

SEQ ID NO: 951 - DNA, 42 bp, Artificial Sequence
  synthetic construct; Oligonucleotide
cagcaacrccgmacccagagtgtagatccccastgmttgcca

SEQ ID NO: 952 - DNA, 42 bp, Artificial Sequence
  synthetic construct; Oligonucleotide
cagcaacrcscaacccagagtgtagatccccasgtcttgcat

SEQ ID NO: 953 - DNA, 42 bp, Artificial Sequence
  synthetic construct; Oligonucleotide
cagcaacrccgmacccagagtgtagatccccasgtcttgcat

SEQ ID NO: 954 - DNA, 42 bp, Artificial Sequence
  synthetic construct; Oligonucleotide
cagcaacrcscaacccagagtgtagatccccastgmttgcat

SEQ ID NO: 955 - DNA, 42 bp, Artificial Sequence
  synthetic construct; Oligonucleotide
cagcaacrccgmacccagagtgtagatccccastgmttgcat

SEQ ID NO: 956 - DNA, 42 bp, Artificial Sequence
  synthetic construct; Oligonucleotide
aggtgtttccctctcctccttagcgacttgcagctcttgatc

SEQ ID NO: 957 - DNA, 42 bp, Artificial Sequence
  synthetic construct; Oligonucleotide
gttcagagcttgtcgtaycagtggcggcwtactatcagtagt

SEQ ID NO: 958 - DNA, 42 bp, Artificial Sequence
  synthetic construct; Oligonucleotide
ttccagagcttgtcgtaycagtggcggcwtactatcagtagt

SEQ ID NO: 959 - DNA, 42 bp, Artificial Sequence
  synthetic construct; Oligonucleotide
gccgaacaggaaggcgrgctctgcaccttggtgatccttgag

SEQ ID NO: 960 - DNA, 42 bp, Artificial Sequence
  synthetic construct; Oligonucleotide
agccttcagctgcttctccaatccagctatgatcagttcaag

SEQ ID NO: 961 - DNA, 42 bp, Artificial Sequence
  synthetic construct; Oligonucleotide
acgcttcagctgcttctccaatccagctatgatcagttcaag

SEQ ID NO: 962 - DNA, 42 bp, Artificial Sequence
  synthetic construct; Oligonucleotide
actcttcagctgcttctccaatccagctatgatcagttcaag

SEQ ID NO: 963 - DNA, 42 bp, Artificial Sequence
  synthetic construct; Oligonucleotide
acacttcagctgcttctccaatccagctatgatcagttcaag

SEQ ID NO: 964 - DNA, 42 bp, Artificial Sequence
  synthetic construct; Oligonucleotide
agccttcagctgcttctccaatccgcdtatgatcagttcaag

SEQ ID NO: 965 - DNA, 42 bp, Artificial Sequence
  synthetic construct; Oligonucleotide
acgcttcagctgcttctccaatccgcdtatgatcagttcaag

SEQ ID NO: 966 - DNA, 42 bp, Artificial Sequence
  synthetic construct; Oligonucleotide
actcttcagctgcttctccaatccgcdtatgatcagttcaag

SEQ ID NO: 967 - DNA, 42 bp, Artificial Sequence
  synthetic construct; Oligonucleotide
acacttcagctgcttctccaatccgcdtatgatcagttcaag

SEQ ID NO: 968 - DNA, 42 bp, Artificial Sequence
  synthetic construct; Oligonucleotide
gcgccaaggtaccttctgcagctatcattaagacccactttc

SEQ ID NO: 969 - DNA, 42 bp, Artificial Sequence; identical to SEQ ID NO: 890
  synthetic construct; Oligonucleotide

SEQ ID NO: 970 - DNA, 42 bp, Artificial Sequence
  synthetic construct; Oligonucleotide
attgagatgctcaacaggcacgctacccastacctacctttg

SEQ ID NO: 971 - DNA, 42 bp, Artificial Sequence
  synthetic construct; Oligonucleotide
attgagatgctcaacaggcacgctacccastactstcctttg

SEQ ID NO: 972 - DNA, 42 bp, Artificial Sequence
  synthetic construct; Oligonucleotide
attgagatgctcaacaggcacgctacctattacctacctttg

SEQ ID NO: 973 - DNA, 42 bp, Artificial Sequence
  synthetic construct; Oligonucleotide
attgagatgctcaacaggcacgctacctattactstcctttg

SEQ ID NO: 974 - DNA, 42 bp, Artificial Sequence
  synthetic construct; Oligonucleotide
attgagatgctcgakaggcacgctacccastacctacctttg

SEQ ID NO: 975 - DNA, 42 bp, Artificial Sequence
  synthetic construct; Oligonucleotide
attgagatgctcgakaggcacgctacccastactstcctttg

SEQ ID NO: 976 - DNA, 42 bp, Artificial Sequence
  synthetic construct; Oligonucleotide
attgagatgctcgakaggcacgctacctattacctacctttg

SEQ ID NO: 977 - DNA, 42 bp, Artificial Sequence
  synthetic construct; Oligonucleotide
attgagatgctcgakaggcacgctacctattactstcctttg

SEQ ID NO: 978 - DNA, 42 bp, Artificial Sequence
  synthetic construct; Oligonucleotide
gwgggggaaagctggcaaratttcttgaggaacaacgctaag

SEQ ID NO: 979 - DNA, 42 bp, Artificial Sequence
  synthetic construct; Oligonucleotide
tccatgagaaatgctttgctcagtcaccgtgatggagccaag

SEQ ID NO: 980 - DNA, 42 bp, Artificial Sequence; identical to SEQ ID NO: 909
  synthetic construct; Oligonucleotide

SEQ ID NO: 981 - DNA, 42 bp, Artificial Sequence
  synthetic construct; Oligonucleotide
gtctgtctaggtacggsgdtcacggagaaccagtatgaaact

SEQ ID NO: 982 - DNA, 42 bp, Artificial Sequence
  synthetic construct; Oligonucleotide
gtctgtctaggtacggsgdtcacggagcaacagtatgaaact

SEQ ID NO: 983 - DNA, 42 bp, Artificial Sequence
  synthetic construct; Oligonucleotide
gtctgtctaggtacggsgtggacggagaaccagtatgaaact

SEQ ID NO: 984 - DNA, 42 bp, Artificial Sequence
  synthetic construct; Oligonucleotide
gtctgtctaggtacggsgtggacggagcaacagtatgaaact

SEQ ID NO: 985 - DNA, 42 bp, Artificial Sequence
  synthetic construct; Oligonucleotide
cttgagaactcacttgccttcctgtgccaacaaggtttctcc

SEQ ID NO: 986 - DNA, 42 bp, Artificial Sequence
  synthetic construct; Oligonucleotide
gttgagaactcacttgccttcctgtgccaacaaggtttctcc

SEQ ID NO: 987 - DNA, 42 bp, Artificial Sequence
  synthetic construct; Oligonucleotide
attgagaactcacttgccttcctgtgccaacaaggtttctcc

SEQ ID NO: 988 - DNA, 42 bp, Artificial Sequence
  synthetic construct; Oligonucleotide
cttgagaactcacttgccttcctgacgcaacaaggtttctcc

SEQ ID NO: 989 - DNA, 42 bp, Artificial Sequence
  synthetic construct; Oligonucleotide
gttgagaactcacttgccttcctgacgcaacaaggtttctcc

SEQ ID NO: 990 - DNA, 42 bp, Artificial Sequence
  synthetic construct; Oligonucleotide
attgagaactcacttgccttcctgacgcaacaaggtttctcc

SEQ ID NO: 991 - DNA, 42 bp, Artificial Sequence
  synthetic construct; Oligonucleotide
cttgagaaccagcttgccttcctgtgccaacaaggtttctcc

SEQ ID NO: 992 - DNA, 42 bp, Artificial Sequence
  synthetic construct; Oligonucleotide
gttgagaaccagcttgccttcctgtgccaacaaggtttctcc

SEQ ID NO: 993 - DNA, 42 bp, Artificial Sequence
  synthetic construct; Oligonucleotide
attgagaaccagcttgccttcctgtgccaacaaggtttctcc

SEQ ID NO: 994 - DNA, 42 bp, Artificial Sequence
  synthetic construct; Oligonucleotide
cttgagaaccagcttgccttcctgacgcaacaaggtttctcc

SEQ ID NO: 995 - DNA, 42 bp, Artificial Sequence
  synthetic construct; Oligonucleotide
gttgagaaccagcttgccttcctgacgcaacaaggtttctcc

SEQ ID NO: 996 - DNA, 42 bp, Artificial Sequence
  synthetic construct; Oligonucleotide
attgagaaccagcttgccttcctgacgcaacaaggtttctcc

SEQ ID NO: 997 - DNA, 42 bp, Artificial Sequence
  synthetic construct; Oligonucleotide
cttgagaacatgcttgccttcctgtgccaacaaggtttctcc

SEQ ID NO: 998 - DNA, 42 bp, Artificial Sequence
  synthetic construct; Oligonucleotide
gttgagaacatgcttgccttcctgtgccaacaaggtttctcc

SEQ ID NO: 999 - DNA, 42 bp, Artificial Sequence
  synthetic construct; Oligonucleotide
attgagaacatgcttgccttcctgtgccaacaaggtttctcc

SEQ ID NO: 1000 - DNA, 42 bp, Artificial Sequence
  synthetic construct; Oligonucleotide
cttgagaacatgcttgccttcctgacgcaacaaggtttctcc

SEQ ID NO: 1001 - DNA, 42 bp, Artificial Sequence
  synthetic construct; Oligonucleotide
gttgagaacatgcttgccttcctgacgcaacaaggtttctcc

SEQ ID NO: 1002 - DNA, 42 bp, Artificial Sequence
  synthetic construct; Oligonucleotide
attgagaacatgcttgccttcctgacgcaacaaggtttctcc

SEQ ID NO: 1003 - DNA, 42 bp, Artificial Sequence
  synthetic construct; Oligonucleotide
gccgagaactcacttgccttcctgtgccaacaaggtttctcc

SEQ ID NO: 1004 - DNA, 42 bp, Artificial Sequence
  synthetic construct; Oligonucleotide
gccgagaactcacttgccttcctgacgcaacaaggtttctcc

SEQ ID NO: 1005 - DNA, 42 bp, Artificial Sequence
  synthetic construct; Oligonucleotide
gccgagaaccagcttgccttcctgtgccaacaaggtttctcc

SEQ ID NO: 1006 - DNA, 42 bp, Artificial Sequence
  synthetic construct; Oligonucleotide
gccgagaaccagcttgccttcctgacgcaacaaggtttctcc

SEQ ID NO: 1007 - DNA, 42 bp, Artificial Sequence
  synthetic construct; Oligonucleotide
gccgagaacatgcttgccttcctgtgccaacaaggtttctcc

SEQ ID NO: 1008 - DNA, 42 bp, Artificial Sequence
  synthetic construct; Oligonucleotide
gccgagaacatgcttgccttcctgacgcaacaaggtttctcc

SEQ ID NO: 1009 - DNA, 42 bp, Artificial Sequence
  synthetic construct; Oligonucleotide
cttgagaatgccctctacgcaatgcrggctgttcggatctwc

SEQ ID NO: 1010 - DNA, 42 bp, Artificial Sequence
  synthetic construct; Oligonucleotide
cttgagaatgccctctacgcaatgcrggctgttgscatctwc

SEQ ID NO: 1011 - DNA, 42 bp, Artificial Sequence
  synthetic construct; Oligonucleotide
cttgagcawgccctctacgcaatgcrggctgttcggatctwc

SEQ ID NO: 1012 - DNA, 42 bp, Artificial Sequence
  synthetic construct; Oligonucleotide
cttgagcawgccctctacgcaatgcrggctgttgscatctwc

SEQ ID NO: 1013 - DNA, 42 bp, Artificial Sequence
  synthetic construct; Oligonucleotide
actctgggttscgtcttgtgggatcaagagctacaagtcgct

SEQ ID NO: 1014 - DNA, 42 bp, Artificial Sequence
  synthetic construct; Oligonucleotide
actctgggttscgtcttgtgggatcaagagadgcaagtcgct

SEQ ID NO: 1015 - DNA, 42 bp, Artificial Sequence
  synthetic construct; Oligonucleotide
actctgggttscgtcttgstagatcaagagctacaagtcgct

SEQ ID NO: 1016 - DNA, 42 bp, Artificial Sequence
  synthetic construct; Oligonucleotide
actctgggttscgtcttgstagatcaagagadgcaagtcgct

SEQ ID NO: 1017 - DNA, 42 bp, Artificial Sequence
  synthetic construct; Oligonucleotide
aaggaggagagggaaacacctactactgatagtatgccgcca

SEQ ID NO: 1018 - DNA, 42 bp, Artificial Sequence
  synthetic construct; Oligonucleotide
aaggaggagagggaaacacctcagactgatagtatgccgcca

SEQ ID NO: 1019 - DNA, 42 bp, Artificial Sequence
  synthetic construct; Oligonucleotide
ctggttcgacaagctktggaactccdggatcaccaaggtgca

SEQ ID NO: 1020 - DNA, 42 bp, Artificial Sequence
  synthetic construct; Oligonucleotide
ctggttcgacaagctktggaactcaaagatcaccaaggtgca

SEQ ID NO: 1021 - DNA, 42 bp, Artificial Sequence
  synthetic construct; Oligonucleotide
ctggttcgacaagcttgggaactccdggatcaccaaggtgca

SEQ ID NO: 1022 - DNA, 42 bp, Artificial Sequence
  synthetic construct; Oligonucleotide
ctggttcgacaagcttgggaactcaaagatcaccaaggtgca

SEQ ID NO: 1023 - DNA, 42 bp, Artificial Sequence
  synthetic construct; Oligonucleotide
grwccagmtttcctgttcggccttgaactgatcatagcagga

SEQ ID NO: 1024 - DNA, 42 bp, Artificial Sequence
  synthetic construct; Oligonucleotide
grwccagmtttcctgttcggccttgaactgatcatahgcgga

SEQ ID NO: 1025 - DNA, 42 bp, Artificial Sequence
  synthetic construct; Oligonucleotide
ttggagaagcagctgaaghgcgaaagtgggtcttaatgatag

SEQ ID NO: 1026 - DNA, 42 bp, Artificial Sequence
  synthetic construct; Oligonucleotide
ttggagaagcagctgaaggcggaaagtgggtcttaatgatag

SEQ ID NO: 1027 - DNA, 42 bp, Artificial Sequence
  synthetic construct; Oligonucleotide
gtgcctgttgagcatctcaatggccatagcgtctagcagagc

SEQ ID NO: 1028 - DNA, 42 bp, Artificial Sequence
  synthetic construct; Oligonucleotide
gtgcctmtcgagcatctcaatggccatagcgtctagcagagc

SEQ ID NO: 1029 - DNA, 42 bp, Artificial Sequence
  synthetic construct; Oligonucleotide
atyttgccagctttcccccwccaaaggtaggtastgggtagc

SEQ ID NO: 1030 - DNA, 42 bp, Artificial Sequence
  synthetic construct; Oligonucleotide
atyttgccagctttcccccwccaaaggasagtastgggtagc

SEQ ID NO: 1031 - DNA, 42 bp, Artificial Sequence
  synthetic construct; Oligonucleotide
atyttgccagctttcccccwccaaaggtaggtaataggtagc

SEQ ID NO: 1032 - DNA, 42 bp, Artificial Sequence
  synthetic construct; Oligonucleotide
atyttgccagctttcccccwccaaaggasagtaataggtagc

SEQ ID NO: 1033 - DNA, 42 bp, Artificial Sequence
  synthetic construct; Oligonucleotide
gagcaaagcatttctcatggacttagcgttgttcctcaagaa

SEQ ID NO: 1034 - DNA, 42 bp, Artificial Sequence
  synthetic construct; Oligonucleotide
gagcaaagcacrtctcatggacttagcgttgttcctcaagaa

SEQ ID NO: 1035 - DNA, 42 bp, Artificial Sequence
  synthetic construct; Oligonucleotide
gahcsccgtacctagacagaccttggctccatcacggtgact

SEQ ID NO: 1036 - DNA, 42 bp, Artificial Sequence
  synthetic construct; Oligonucleotide
ccacsccgtacctagacagaccttggctccatcacggtgact

SEQ ID NO: 1037 - DNA, 42 bp, Artificial Sequence
  synthetic construct; Oligonucleotide
gaaggcaagtgagttctcaabagtttcatactggttctccgt

SEQ ID NO: 1038 - DNA, 42 bp, Artificial Sequence
  synthetic construct; Oligonucleotide
gaaggcaagctggttctcaabagtttcatactggttctccgt

SEQ ID NO: 1039 - DNA, 42 bp, Artificial Sequence
  synthetic construct; Oligonucleotide
gaaggcaagcatgttctcaabagtttcatactggttctccgt

SEQ ID NO: 1040 - DNA, 42 bp, Artificial Sequence
  synthetic construct; Oligonucleotide
gaaggcaagtgagttctcggcagtttcatactggttctccgt

SEQ ID NO: 1041 - DNA, 42 bp, Artificial Sequence
  synthetic construct; Oligonucleotide
gaaggcaagctggttctcggcagtttcatactggttctccgt

SEQ ID NO: 1042 - DNA, 42 bp, Artificial Sequence
  synthetic construct; Oligonucleotide
gaaggcaagcatgttctcggcagtttcatactggttctccgt

SEQ ID NO: 1043 - DNA, 42 bp, Artificial Sequence
  synthetic construct; Oligonucleotide
gaaggcaagtgagttctcaabagtttcatactgttgctccgt

SEQ ID NO: 1044 - DNA, 42 bp, Artificial Sequence
  synthetic construct; Oligonucleotide
gaaggcaagctggttctcaabagtttcatactgttgctccgt

SEQ ID NO: 1045 - DNA, 42 bp, Artificial Sequence
  synthetic construct; Oligonucleotide
gaaggcaagcatgttctcaabagtttcatactgttgctccgt

SEQ ID NO: 1046 - DNA, 42 bp, Artificial Sequence
  synthetic construct; Oligonucleotide
gaaggcaagtgagttctcggcagtttcatactgttgctccgt

SEQ ID NO: 1047 - DNA, 42 bp, Artificial Sequence
  synthetic construct; Oligonucleotide
gaaggcaagctggttctcggcagtttcatactgttgctccgt

SEQ ID NO: 1048 - DNA, 42 bp, Artificial Sequence
  synthetic construct; Oligonucleotide
gaaggcaagcatgttctcggcagtttcatactgttgctccgt

SEQ ID NO: 1049 - DNA, 42 bp, Artificial Sequence
  synthetic construct; Oligonucleotide
tgcgtagagggcattctcaagggagaaaccttgttggcacag

SEQ ID NO: 1050 - DNA, 42 bp, Artificial Sequence
  synthetic construct; Oligonucleotide
tgcgtagagggcwtgctcaagggagaaaccttgttggcacag

SEQ ID NO: 1051 - DNA, 42 bp, Artificial Sequence
  synthetic construct; Oligonucleotide
tgcgtagagggcattctcaagggagaaaccttgttgcgtcag

SEQ ID NO: 1052 - DNA, 42 bp, Artificial Sequence
  synthetic construct; Oligonucleotide
tgcgtagagggcwtgctcaagggagaaaccttgttgcgtcag

SEQ ID NO: 1053 - DNA, 42 bp, Artificial Sequence
  synthetic construct; Oligonucleotide
ccacaagacgsaacccagagtgwagatccgaacagccygcat

SEQ ID NO: 1054 - DNA, 42 bp, Artificial Sequence
  synthetic construct; Oligonucleotide
tascaagacgsaacccagagtgwagatccgaacagccygcat

SEQ ID NO: 1055 - DNA, 42 bp, Artificial Sequence
  synthetic construct; Oligonucleotide
ccacaagacgsaacccagagtgwagatgscaacagccygcat

SEQ ID NO: 1056 - DNA, 42 bp, Artificial Sequence
  synthetic construct; Oligonucleotide
tascaagacgsaacccagagtgwagatgscaacagccygcat

SEQ ID NO: 1057 - DNA, 42 bp, Artificial Sequence
  synthetic construct; Oligonucleotide
aggtgtttccctctcctccttagcgacttgtagctcttgatc

SEQ ID NO: 1058 - DNA, 42 bp, Artificial Sequence
  synthetic construct; Oligonucleotide
aggtgtttccctctcctccttagcgacttgchtctcttgatc

SEQ ID NO: 1059 - DNA, 42 bp, Artificial Sequence
  synthetic construct; Oligonucleotide
ttccamagcttgtcgaaccagtggcggcatactatcagtagt

SEQ ID NO: 1060 - DNA, 42 bp, Artificial Sequence
  synthetic construct; Oligonucleotide
ttcccaagcttgtcgaaccagtggcggcatactatcagtagt

SEQ ID NO: 1061 - DNA, 42 bp, Artificial Sequence
  synthetic construct; Oligonucleotide
ttccamagcttgtcgaaccagtggcggcatactatcagtctg

SEQ ID NO: 1062 - DNA, 42 bp, Artificial Sequence
  synthetic construct; Oligonucleotide
ttcccaagcttgtcgaaccagtggcggcatactatcagtctg

SEQ ID NO: 1063 - DNA, 42 bp, Artificial Sequence
  synthetic construct; Oligonucleotide
gccgaacaggaaakctggwyctgcaccttggtgatcchggag

SEQ ID NO: 1064 - DNA, 42 bp, Artificial Sequence
  synthetic construct; Oligonucleotide
gccgaacaggaaakctggwyctgcaccttggtgatctttgag

SEQ ID NO: 1065 - DNA, 42 bp, Artificial Sequence
  synthetic construct; Oligonucleotide
gcdcttcagctgcttctccaatcctgctatgatcagttcaag

SEQ ID NO: 1066 - DNA, 42 bp, Artificial Sequence
  synthetic construct; Oligonucleotide
cgccttcagctgcttctccaatcctgctatgatcagttcaag

SEQ ID NO: 1067 - DNA, 42 bp, Artificial Sequence
  synthetic construct; Oligonucleotide
gcdcttcagctgcttctccaatccgcdtatgatcagttcaag

SEQ ID NO: 1068 - DNA, 42 bp, Artificial Sequence
  synthetic construct; Oligonucleotide
cgccttcagctgcttctccaatccgcdtatgatcagttcaag

SEQ ID NO: 1069 - DNA, 42 bp, Artificial Sequence; identical to SEQ ID NO: 968
  synthetic construct; Oligonucleotide

SEQ ID NO: 1070 - DNA, 42 bp, Artificial Sequence; identical to SEQ ID NO: 890
  synthetic construct; Oligonucleotide

SEQ ID NO: 1071 - DNA, 42 bp, Artificial Sequence
  synthetic construct; Oligonucleotide
attgagatgctcgataggcacgctacccactactstcctttg

SEQ ID NO: 1072 - DNA, 42 bp, Artificial Sequence
  synthetic construct; Oligonucleotide
attgagatgctcgataggcacgctacccactacctacctttg

SEQ ID NO: 1073 - DNA, 42 bp, Artificial Sequence
  synthetic construct; Oligonucleotide
gaaggggaaagctggcaagacttcttgaggaacaacgctaag

SEQ ID NO: 1074 - DNA, 42 bp, Artificial Sequence
  synthetic construct; Oligonucleotide
tccatgagaygcgctttgctcagtcaccgtgatggagccaag

SEQ ID NO: 1075 - DNA, 42 bp, Artificial Sequence; identical to SEQ ID NO: 979
  synthetic construct; Oligonucleotide

SEQ ID NO: 1076 - DNA, 42 bp, Artificial Sequence
  synthetic construct; Oligonucleotide
gtctgtctaggtacgggcttcacggagcaacagtatgaaact

SEQ ID NO: 1077 - DNA, 42 bp, Artificial Sequence
  synthetic construct; Oligonucleotide
gctgagaacagccttgccttcctgacacaacaaggtttctcc

SEQ ID NO: 1078 - DNA, 42 bp, Artificial Sequence
  synthetic construct; Oligonucleotide
gctgagaacagccttgccttcctgtgtcaacaaggtttctcc

SEQ ID NO: 1079 - DNA, 42 bp, Artificial Sequence
  synthetic construct; Oligonucleotide
cttgagaacgccctctacgcaatgcaagctgttgggatctac

SEQ ID NO: 1080 - DNA, 42 bp, Artificial Sequence
  synthetic construct; Oligonucleotide
actctgggtwgtgtcttgctggatcaagagctgcaagtcgct

SEQ ID NO: 1081 - DNA, 42 bp, Artificial Sequence; identical to SEQ ID NO: 1017
  synthetic construct; Oligonucleotide

SEQ ID NO: 1082 - DNA, 42 bp, Artificial Sequence
  synthetic construct; Oligonucleotide
ctggttcgacaagctctggaactcaaggatcaccaaggtgca

SEQ ID NO: 1083 - DNA, 42 bp, Artificial Sequence
  synthetic construct; Oligonucleotide
gagccagccttcctgttcggccttgaactgatcatagcagga

SEQ ID NO: 1084 - DNA, 42 bp, Artificial Sequence
  synthetic construct; Oligonucleotide
gagccagccttcctgttcggccttgaactgatcatahgcgga

SEQ ID NO: 1085 - DNA, 42 bp, Artificial Sequence
  synthetic construct; Oligonucleotide
ttggagaagcagctgaaggccgaaagtgggtcttaatgatag

SEQ ID NO: 1086 - DNA, 42 bp, Artificial Sequence; identical to SEQ ID NO: 930
  synthetic construct; Oligonucleotide

SEQ ID NO: 1087 - DNA, 42 bp, Artificial Sequence
  synthetic construct; Oligonucleotide
gtgcctatcgagcatctcaatggccatagcgtctagcagagc

SEQ ID NO: 1088 - DNA, 42 bp, Artificial Sequence
  synthetic construct; Oligonucleotide
gtcttgccagctttccccttccaaaggasagtagtgggtagc

SEQ ID NO: 1089 - DNA, 42 bp, Artificial Sequence
  synthetic construct; Oligonucleotide
gtcttgccagctttccccttccaaaggtaggtagtgggtagc

SEQ ID NO: 1090 - DNA, 42 bp, Artificial Sequence
  synthetic construct; Oligonucleotide
gagcaaagcgcrtctcatggacttagcgttgttcctcaagaa

SEQ ID NO: 1091 - DNA, 42 bp, Artificial Sequence; identical to SEQ ID NO: 1033
  synthetic construct; Oligonucleotide

SEQ ID NO: 1092 - DNA, 42 bp, Artificial Sequence
  synthetic construct; Oligonucleotide
gaagcccgtacctagacagaccttggctccatcacggtgact

SEQ ID NO: 1093 - DNA, 42 bp, Artificial Sequence
  synthetic construct; Oligonucleotide
gaaggcaaggctgttctcagcagtttcatactgttgctccgt

SEQ ID NO: 1094 - DNA, 42 bp, Artificial Sequence
  synthetic construct; Oligonucleotide
tgcgtagagggcgttctcaagggagaaaccttgttgtgtcag

SEQ ID NO: 1095 - DNA, 42 bp, Artificial Sequence; identical to SEQ ID NO: 946
  synthetic construct; Oligonucleotide

SEQ ID NO: 1096 - DNA, 42 bp, Artificial Sequence
  synthetic construct; Oligonucleotide
cagcaagacacwacccagagtgtagatcccaacagcttgcat

SEQ ID NO: 1097 - DNA, 42 bp, Artificial Sequence; identical to SEQ ID NO: 956
  synthetic construct; Oligonucleotide

SEQ ID NO: 1098 - DNA, 42 bp, Artificial Sequence
  synthetic construct; Oligonucleotide
ttccagagcttgtcgaaccagtggcggcatactatcagtagt

SEQ ID NO: 1099 - DNA, 42 bp, Artificial Sequence
  synthetic construct; Oligonucleotide
gccgaacaggaaggctggctctgcaccttggtgatccttgag

SEQ ID NO: 1100 - DNA, 42 bp, Artificial Sequence
  synthetic construct; Oligonucleotide
ggccttcagctgcttctccaatcctgctatgatcagttcaag

SEQ ID NO: 1101 - DNA, 42 bp, Artificial Sequence
  synthetic construct; Oligonucleotide
acdcttcagctgcttctccaatcctgctatgatcagttcaag

SEQ ID NO: 1102 - DNA, 42 bp, Artificial Sequence
  synthetic construct; Oligonucleotide
ggccttcagctgcttctccaatccgcdtatgatcagttcaag

SEQ ID NO: 1103 - DNA, 42 bp, Artificial Sequence
  synthetic construct; Oligonucleotide
acdcttcagctgcttctccaatccgcdtatgatcagttcaag

SEQ ID NO: 1104 - DNA, 42 bp, Artificial Sequence; identical to SEQ ID NO: 968
  synthetic construct; Oligonucleotide

SEQ ID NO: 1105 - DNA, 30 bp, Artificial Sequence
  synthetic construct; Oligonucleotide
cacgtcaagaacaagcgagctctgctagac

SEQ ID NO: 1106 - DNA, 37 bp, Artificial Sequence
  synthetic construct; Oligonucleotide
ggaacttcggcgcgccaaggtaccttctgcagctatc

SEQ ID NO: 1107 - DNA, 42 bp, Artificial Sequence; identical to SEQ ID NO: 890
  synthetic construct; Oligonucleotide

SEQ ID NO: 1108 - DNA, 42 bp, Artificial Sequence
  synthetic construct; Oligonucleotide
atcgagatgctcgatcsccacgctatacactwtttacyattg

SEQ ID NO: 1109 - DNA, 42 bp, Artificial Sequence
  synthetic construct; Oligonucleotide
ttcgagatgctcgatcsccacgctatacactwtttacyattg

SEQ ID NO: 1110 - DNA, 42 bp, Artificial Sequence
  synthetic construct; Oligonucleotide
atcgagatgctcgatcsccacgctmcccactwtttacyattg

SEQ ID NO: 1111 - DNA, 42 bp, Artificial Sequence
  synthetic construct; Oligonucleotide
ttcgagatgctcgatcsccacgctmcccactwtttacyattg

SEQ ID NO: 1112 - DNA, 42 bp, Artificial Sequence
  synthetic construct; Oligonucleotide
gaaggggmaagctggcaaaatttcttgaggaacaamgctaag

SEQ ID NO: 1113 - DNA, 42 bp, Artificial Sequence; identical to SEQ ID NO: 908
  synthetic construct; Oligonucleotide

SEQ ID NO: 1114 - DNA, 42 bp, Artificial Sequence
  synthetic construct; Oligonucleotide
gtctgtctaggtacgggcttcacggagcaacaatatgaaact

SEQ ID NO: 1115 - DNA, 42 bp, Artificial Sequence
  synthetic construct; Oligonucleotide
gcggagaaccgccttgccttcctgacacaacaaggtttctcc

SEQ ID NO: 1116 - DNA, 42 bp, Artificial Sequence
  synthetic construct; Oligonucleotide
cttgagaacgccctctacgcatggcaagcagtggggatctac

SEQ ID NO: 1117 - DNA, 42 bp, Artificial Sequence
  synthetic construct; Oligonucleotide
cttgagcaggccctctacgcatggcaagcagtggggatctac

SEQ ID NO: 1118 - DNA, 42 bp, Artificial Sequence
  synthetic construct; Oligonucleotide
actctgggttgtgtcttgctggatcaagagctgcaagtcgct

SEQ ID NO: 1119 - DNA, 42 bp, Artificial Sequence; identical to SEQ ID NO: 1017
  synthetic construct; Oligonucleotide

SEQ ID NO: 1120 - DNA, 42 bp, Artificial Sequence
  synthetic construct; Oligonucleotide
ctggttcgacaagctktagaactcaaggatcaccaaggtgca

SEQ ID NO: 1121 - DNA, 42 bp, Artificial Sequence
  synthetic construct; Oligonucleotide
ctggttcgacaagcttgggaactcaaggatcaccaaggtgca

SEQ ID NO: 1122 - DNA, 42 bp, Artificial Sequence
  synthetic construct; Oligonucleotide
gagccagccttcctgttcggccttgaactgatcatatcagga

SEQ ID NO: 1123 - DNA, 42 bp, Artificial Sequence
  synthetic construct; Oligonucleotide
ttggagaagcagctgaaggcagaaagtgggtcttaatgatag

SEQ ID NO: 1124 - DNA, 42 bp, Artificial Sequence; identical to SEQ ID NO: 931
  synthetic construct; Oligonucleotide

SEQ ID NO: 1125 - DNA, 42 bp, Artificial Sequence
  synthetic construct; Oligonucleotide
attttgccagcttkccccttccaatrgtaaawagtgtatagc

SEQ ID NO: 1126 - DNA, 42 bp, Artificial Sequence
  synthetic construct; Oligonucleotide
attttgccagcttkccccttccaatrgtaaawagtgggkagc

SEQ ID NO: 1127 - DNA, 42 bp, Artificial Sequence; identical to SEQ ID NO: 940
  synthetic construct; Oligonucleotide

SEQ ID NO: 1128 - DNA, 42 bp, Artificial Sequence; identical to SEQ ID NO: 1092
  synthetic construct; Oligonucleotide

SEQ ID NO: 1129 - DNA, 42 bp, Artificial Sequence
  synthetic construct; Oligonucleotide
gaaggcaaggcggttctccgcagtttcatattgttgctccgt

SEQ ID NO: 1130 - DNA, 42 bp, Artificial Sequence; identical to SEQ ID NO: 1094
  synthetic construct; Oligonucleotide

SEQ ID NO: 1131 - DNA, 42 bp, Artificial Sequence
  synthetic construct; Oligonucleotide
tgcgtagagggcctgctcaagggagaaaccttgttgtgtcag

SEQ ID NO: 1132 - DNA, 42 bp, Artificial Sequence
  synthetic construct; Oligonucleotide
cagcaagacacaacccagagtgtagatccccactgcttgcca

SEQ ID NO: 1133 - DNA, 42 bp, Artificial Sequence; identical to SEQ ID NO: 956
  synthetic construct; Oligonucleotide

SEQ ID NO: 1134 - DNA, 42 bp, Artificial Sequence
  synthetic construct; Oligonucleotide
ttctamagcttgtcgaaccagtggcggcatactatcagtagt

SEQ ID NO: 1135 - DNA, 42 bp, Artificial Sequence; identical to SEQ ID NO: 1060
  synthetic construct; Oligonucleotide

SEQ ID NO: 1136 - DNA, 42 bp, Artificial Sequence; identical to SEQ ID NO: 1099
  synthetic construct; Oligonucleotide

SEQ ID NO: 1137 - DNA, 42 bp, Artificial Sequence
  synthetic construct; Oligonucleotide
tgccttcagctgcttctccaatcctgatatgatcagttcaag

SEQ ID NO: 1138 - DNA, 42 bp, Artificial Sequence; identical to SEQ ID NO: 968
  synthetic construct; Oligonucleotide

SEQ ID NO: 1139 - DNA, 42 bp, Artificial Sequence; identical to SEQ ID NO: 890
  synthetic construct; Oligonucleotide

SEQ ID NO: 1140 - DNA, 42 bp, Artificial Sequence
  synthetic construct; Oligonucleotide
atagagatgctcgatcsgcaccaaaytcactacttacccttg

SEQ ID NO: 1141 - DNA, 42 bp, Artificial Sequence
  synthetic construct; Oligonucleotide
atagagatgctcgatcsgcacavgaytcactacttacccttg

SEQ ID NO: 1142 - DNA, 42 bp, Artificial Sequence
  synthetic construct; Oligonucleotide
gaaggggaaagctggcaaratttcttgaggaacwgggctaag

SEQ ID NO: 1143 - DNA, 42 bp, Artificial Sequence
  synthetic construct; Oligonucleotide
gaaggggaaagctggcaaratttcttgaggaacaakgctaag

SEQ ID NO: 1144 - DNA, 42 bp, Artificial Sequence; identical to SEQ ID NO: 979
  synthetic construct; Oligonucleotide

SEQ ID NO: 1145 - DNA, 42 bp, Artificial Sequence
  synthetic construct; Oligonucleotide
gtcgcactaggtacgggcttcacggagmracaatatgaaact

SEQ ID NO: 1146 - DNA, 42 bp, Artificial Sequence
  synthetic construct; Oligonucleotide
gtctgtctaggtacgggcttcacggagmracaatatgaaact

SEQ ID NO: 1147 - DNA, 42 bp, Artificial Sequence
  synthetic construct; Oligonucleotide
atggagaactsgcttgccttcctgacacaacaaggtttctcc

SEQ ID NO: 1148 - DNA, 42 bp, Artificial Sequence
  synthetic construct; Oligonucleotide
atggagaacaascttgccttcctgacacaacaaggtttctcc

SEQ ID NO: 1149 - DNA, 42 bp, Artificial Sequence
  synthetic construct; Oligonucleotide
caagagaactsgcttgccttcctgacacaacaaggtttctcc

SEQ ID NO: 1150 - DNA, 42 bp, Artificial Sequence
  synthetic construct; Oligonucleotide
caagagaacaascttgccttcctgacacaacaaggtttctcc

SEQ ID NO: 1151 - DNA, 42 bp, Artificial Sequence
  synthetic construct; Oligonucleotide
gctgagaactsgcttgccttcctgacacaacaaggtttctcc

SEQ ID NO: 1152 - DNA, 42 bp, Artificial Sequence
  synthetic construct; Oligonucleotide
tctgagaactsgcttgccttcctgacacaacaaggtttctcc

SEQ ID NO: 1153 - DNA, 42 bp, Artificial Sequence
  synthetic construct; Oligonucleotide
gctgagaacaascttgccttcctgacacaacaaggtttctcc

SEQ ID NO: 1154 - DNA, 42 bp, Artificial Sequence
  synthetic construct; Oligonucleotide
tctgagaacaascttgccttcctgacacaacaaggtttctcc

SEQ ID NO: 1155 - DNA, 42 bp, Artificial Sequence
  synthetic construct; Oligonucleotide
cttgagaacgccctctacgcattccaagcagtggggatctac

SEQ ID NO: 1156 - DNA, 42 bp, Artificial Sequence
  synthetic construct; Oligonucleotide
cttgagaacgccctctacgcaakgcaagcagtggggatctac

SEQ ID NO: 1157 - DNA, 42 bp, Artificial Sequence
  synthetic construct; Oligonucleotide
cttgagaacgccctctacgcaaatcaagcagtggggatctac

SEQ ID NO: 1158 - DNA, 42 bp, Artificial Sequence; identical to SEQ ID NO: 1118
  synthetic construct; Oligonucleotide

SEQ ID NO: 1159 - DNA, 42 bp, Artificial Sequence; identical to SEQ ID NO: 1017
  synthetic construct; Oligonucleotide

SEQ ID NO: 1160 - DNA, 42 bp, Artificial Sequence
  synthetic construct; Oligonucleotide
ctggttcgacaagcttacgaactcgcggatcaccaaggtgca

SEQ ID NO: 1161 - DNA, 42 bp, Artificial Sequence
  synthetic construct; Oligonucleotide
ctggttcgacaagcttacgaactctycgatcaccaaggtgca

SEQ ID NO: 1162 - DNA, 42 bp, Artificial Sequence
  synthetic construct; Oligonucleotide
ctggttcgacaagcttacgaactcaatgatcaccaaggtgca

SEQ ID NO: 1163 - DNA, 42 bp, Artificial Sequence
  synthetic construct; Oligonucleotide
ctggttcgacaagctdttgaactcgcggatcaccaaggtgca

SEQ ID NO: 1164 - DNA, 42 bp, Artificial Sequence
  synthetic construct; Oligonucleotide
ctggttcgacaagctdttgaactctycgatcaccaaggtgca

SEQ ID NO: 1165 - DNA, 42 bp, Artificial Sequence
  synthetic construct; Oligonucleotide
ctggttcgacaagctdttgaactcaatgatcaccaaggtgca

SEQ ID NO: 1166 - DNA, 42 bp, Artificial Sequence; identical to SEQ ID NO: 1122
  synthetic construct; Oligonucleotide

SEQ ID NO: 1167 - DNA, 42 bp, Artificial Sequence; identical to SEQ ID NO: 1085
  synthetic construct; Oligonucleotide

SEQ ID NO: 1168 - DNA, 42 bp, Artificial Sequence
  synthetic construct; Oligonucleotide
gtgcsgatcgagcatctctatggccatagcgtctagcagagc

SEQ ID NO: 1169 - DNA, 42 bp, Artificial Sequence
  synthetic construct; Oligonucleotide
atyttgccagctttccccttccaagggtaagtagtgartttg

SEQ ID NO: 1170 - DNA, 42 bp, Artificial Sequence
  synthetic construct; Oligonucleotide
atyttgccagctttccccttccaagggtaagtagtgartcbt

SEQ ID NO: 1171 - DNA, 42 bp, Artificial Sequence
  synthetic construct; Oligonucleotide
gagcaaagcatttctcatggacttagcccwgttcctcaagaa

SEQ ID NO: 1172 - DNA, 42 bp, Artificial Sequence
  synthetic construct; Oligonucleotide
gagcaaagcatttctcatggacttagcmttgttcctcaagaa

SEQ ID NO: 1173 - DNA, 42 bp, Artificial Sequence
  synthetic construct; Oligonucleotide
gaagcccgtacctagtgcgaccttggctccatcacggtgact

SEQ ID NO: 1174 - DNA, 42 bp, Artificial Sequence; identical to SEQ ID NO: 1092
  synthetic construct; Oligonucleotide

SEQ ID NO: 1175 - DNA, 42 bp, Artificial Sequence
  synthetic construct; Oligonucleotide
gaaggcaagcsagttctccatagtttcatattgtykctccgt

SEQ ID NO: 1176 - DNA, 42 bp, Artificial Sequence
  synthetic construct; Oligonucleotide
gaaggcaagsttgttctccatagtttcatattgtykctccgt

SEQ ID NO: 1177 - DNA, 42 bp, Artificial Sequence
  synthetic construct; Oligonucleotide
gaaggcaagcsagttctcttgagtttcatattgtykctccgt

SEQ ID NO: 1178 - DNA, 42 bp, Artificial Sequence
  synthetic construct; Oligonucleotide
gaaggcaagsttgttctcttgagtttcatattgtykctccgt

SEQ ID NO: 1179 - DNA, 42 bp, Artificial Sequence
  synthetic construct; Oligonucleotide
gaaggcaagcsagttctcagmagtttcatattgtykctccgt

SEQ ID NO: 1180 - DNA, 42 bp, Artificial Sequence
  synthetic construct; Oligonucleotide
gaaggcaagsttgttctcagmagtttcatattgtykctccgt

SEQ ID NO: 1181 - DNA, 42 bp, Artificial Sequence; identical to SEQ ID NO: 1094
  synthetic construct; Oligonucleotide

SEQ ID NO: 1182 - DNA, 42 bp, Artificial Sequence
  synthetic construct; Oligonucleotide
cagcaagacacaacccagagtgtagatccccactgcttggaa

SEQ ID NO: 1183 - DNA, 42 bp, Artificial Sequence
  synthetic construct; Oligonucleotide
cagcaagacacaacccagagtgtagatccccactgcttgcmt

SEQ ID NO: 1184 - DNA, 42 bp, Artificial Sequence
  synthetic construct; Oligonucleotide
cagcaagacacaacccagagtgtagatccccactgcttgatt

SEQ ID NO: 1185 - DNA, 42 bp, Artificial Sequence; identical to SEQ ID NO: 956
  synthetic construct; Oligonucleotide

SEQ ID NO: 1186 - DNA, 42 bp, Artificial Sequence
  synthetic construct; Oligonucleotide
ttcgtaagcttgtcgaaccagtggcggcatactatcagtagt

SEQ ID NO: 1187 - DNA, 42 bp, Artificial Sequence
  synthetic construct; Oligonucleotide
ttcaahagcttgtcgaaccagtggcggcatactatcagtagt

SEQ ID NO: 1188 - DNA, 42 bp, Artificial Sequence
  synthetic construct; Oligonucleotide
gccgaacaggaaggctggctctgcaccttggtgatccgcgag

SEQ ID NO: 1189 - DNA, 42 bp, Artificial Sequence
  synthetic construct; Oligonucleotide
gccgaacaggaaggctggctctgcaccttggtgatcgragag

SEQ ID NO: 1190 - DNA, 42 bp, Artificial Sequence
  synthetic construct; Oligonucleotide
gccgaacaggaaggctggctctgcaccttggtgatcattgag

SEQ ID NO: 1191 - DNA, 42 bp, Artificial Sequence
  synthetic construct; Oligonucleotide
ggccttcagctgcttctccaatcctgatatgatcagttcaag

SEQ ID NO: 1192 - DNA, 42 bp, Artificial Sequence; identical to SEQ ID NO: 968
  synthetic construct; Oligonucleotide

SEQ ID NO: 1193 - DNA, 621 bp, Artificial Sequence
  synthetic construct; nucleotides encoding sulfonylurea responsive repressor
atggccagactcgacaagagcaaggtgatcaacagcgcactggagctgctgaacgaggtcggaatcgaaggcctcacaacccgtaagctcgcccagaagctcggggttgagcagcctacattgtactggcacgtcaagaacaagcgagctctgctagacgctatggccattgagatgctcgataggcacgctacccactactgtcctttggaaggggaaagctggcaagacttcttgaggaacaaagctaagtccatgagaaatgctttgctcagtcaccgtgatggagccaaggtctgtctaggtacgggcttcacggagcaacagtatgaaactgctgagaacagccttgccttcctgtgtcaacaaggtttctcccttgagaacgccctctacgcaatgcaagctgttgggatctacactctgggttgtgtcttgctggatcaagagctgcaagtcgctaaggaggagagggaaacacctactactgatagtatgccgccactggttcgacaagctctggaactcaaagatcaccaaggtgcagagccagccttcctgttcggccttgaactgatcatagcaggattggagaagcagctgaaggccgaaagtgggtct

SEQ ID NO: 1194 - DNA, 621 bp, Artificial Sequence
  synthetic construct; nucleotides encoding sulfonylurea responsive repressor
atggccagactcgacaagagcaaggtgatcaacagcgcactggagctgctgaacgaggtcggaatcgaaggcctcacaacccgtaagctcgcccagaagctcggggttgagcagcctacattgtactggcacgtcaagaacaagcgagctctgctagacgctatggccattgagatgctcgatcgccacgctacccactactgtcctttggaaggggaaagctggcaagacttcttgaggaacaaagctaagtccatgagatgtgctttgctcagtcaccgtgatggagccaaggtctgtctaggtacgggcttcacggagcaacagtatgaaactgctgagaacagccttgccttcctgtgtcaacaaggtttctcccttgagaacgccctctacgcaatgcaagctgttgggatctacactctgggttgtgtcttgctggatcaagagctgcaagtcgctaaggaggagagggaaacacctactactgatagtatgccgccactggttcgacaagctctggaactcaaggatcaccaaggtgcagagccagccttcctgttcggccttgaactgatcataagcggattggagaagcagctgaaggccgaaagtgggtct

SEQ ID NO: 1195 - DNA, 621 bp, Artificial Sequence
  synthetic construct; nucleotides encoding sulfonylurea responsive repressor
atggccagactcgacaagagcaaggtgatcaacagcgcactggagctgctgaacgaggtcggaatcgaaggcctcacaacccgtaagctcgcccagaagctcggggttgagcagcctacattgtactggcacgtcaagaacaagcgagctctgctagacgctatggccattgagatgctcgataggcacgctacccactacctacctttggaaggggcaagctggcaagacttcttgaggaacaaagctaagtccatgagaaatgctttgctcagtcaccgtgatggagccaaggtctgtctaggtacgggcttcacggagcaacagtatgaaactgctgagaacagccttgccttcctgtgtcaacaaggtttctcccttgagaacgccctctacgcaatgcaagctgttgggatctacactctgggttgtgtcttgctggatcaagagctgcaagtcgctaaggaggagagggaaacacctactactgatagtatgccgccactggttcgacaagctctggaactcaaggatcaccaaggtgcagagccagccttcctgttcggccttgaactgatcatagcaggattggagaagcagctgaagagtgaaagtgggtct

SEQ ID NO: 1196 - DNA, 621 bp, Artificial Sequence
  synthetic construct; nucleotides encoding sulfonylurea responsive repressor
atggccagactcgacaagagcaaggtgatcaacagcgcactggagctgctgaacgaggtcggaatcgaaggcctcacaacccgtaagctcgcccagaagctcggggttgagcagcctacattgtactggcacgtcaagaacaagcgagctctgctagacgctatggccattgagatgctcgatccccacgctatacacttgttacccttggaaggggcaagctggcaagacttcttgaggaacaacgctaagtccatgagacgcgctttgctcagtcaccgtgatggagccaaggtctgtctaggtacgggcttcacggagcaacagtatgaaactgctgagaacagccttgccttcctgtgtcaacaaggtttctcccttgagaacgccctctacgcaatgcaagctgttgggatctacactctgggttgtgtcttgctggatcaagagctgcaagtcgctaaggaggagagggaaacacctactactgatagtatgccgccactggttcgacaagctctggaactcaaggatcaccaaggtgcagagccagccttcctgttcggccttgaactgatcatatgcggattggagaagcagctgaaggccgaaagtgggtct

SEQ ID NO: 1197 - DNA, 621 bp, Artificial Sequence
  synthetic construct; nucleotides encoding sulfonylurea responsive repressor
atggccagactcgacaagagcaaggtgatcaacagcgcactggagctgctgaacgaggtcggaatcgaaggcctcacaacccgtaagctcgcccagaagctcggggttgagcagcctacattgtactggcacgtcaagaacaagcgagctctgctagacgctatggccattgagatgctcgataggcacgctacccactacctacctttggaaggggaaagctggcaagacttcttgaggaacaaagctaagtccatgagatgtgctttgcttagtcaccgtgatggagccaaggtctgtctaggtacgggcttcacggagcaacagtatgaaactgctgagaacagccttgccttcctgacacaacaaggtttctcccttgagaacgccctctacgcaatgcaagctgttgggatctacactctgggttgtgtcttgctggatcaagagctgcaagtcgctaaggaggagagggaaacacctactactgatagtatgccgccactggttcgacaagctctggaactcaaggatcaccaaggtgcagagctcgccttcctgttcggccttgaactgatcatacgcggattggagaagcagctgaagtgtgaaagtgggtct

SEQ ID NO: 1198 - DNA, 621 bp, Artificial Sequence
  synthetic construct; nucleotides encoding sulfonylurea responsive repressor
atggccagactcgacaagagcaaggtgatcaacagcgcactggagctgctgaacgaggtcggaatcgaaggcctcacaacccgtaagctcgcccagaagctcggggttgagcagcctacattgtactggcacgtcaagaacaagcgagctctgctagacgctatggccattgagatgctcgatccccacgctacccacttctgtctcttggaaggggaaagctggcaagacttcttgaggaacaacgctaagtccatgagaaatgctttgctcagtcaccgtgatggagccaaggtctgtctaggtacgggcttcacggagcaacagtatgaaactgctgagaacagccttgccttcctgtgtcaacaaggtttctcccttgagaacgccctctacgcaatgcaagctgttgggatctacactctgggttgtgtcttgctggatcaagagctgcaagtcgctaaggaggagagggaaacacctactactgatagtatgccgccactggttcgacaagctctggaactcaaggatcaccaaggtgcagagccagccttcctgttcggccttgaactgatcataagcggattggagaagcagctgaagtgtgaaagtgggtct

SEQ ID NO: 1199 - DNA, 621 bp, Artificial Sequence
  synthetic construct; nucleotides encoding sulfonylurea responsive repressor
atggccagactcgacaagagcaaggtgatcaacagcgcactggagctgctgaacgaggtcggaatcgaaggcctcacaacccgtaagctcgcccagaagctcggggttgagcagcctacattgtactggcacgtcaagaacaagcgagctctgctagacgctatggccattgagatgctcgataggcacgctacccactactctcctttggaaggggaaagctggcaagacttcttgaggaacaaagctaagtccatgagatgcgctttgctcagtcaccgtgatggagccaaggtctgtctaggtacgggcttcacggagcaacagtatgaaactgctgagaacagccttgccttcctgacacaacaaggtttctcccttgagaacgccctctacgcaatgcaagctgttgggatctacactctgggttgtgtcttgctggatcaagagctgcaagtcgctaaggaggagagggaaacacctactactgatagtatgccgccactggttcgacaagctctggaactcaaggatcaccaaggtgcagagcccgccttcctgttcggccttgaactgatcatagcaggattggagaagcagctgaaggccgaaagtgggtct

SEQ ID NO: 1200 - DNA, 621 bp, Artificial Sequence
  synthetic construct; nucleotides encoding sulfonylurea responsive repressor
atggccagactcgacaagagcaaggtgatcaacagcgcactggagctgctgaacgaggtcggaatcgaaggcctcacaacccgtaagctcgcccagaagctcggggttgagcagcctacattgtactggcacgtcaagaacaagcgagctctgctagacgctatggccatcgagatgctcgatccccacgctccccacttgttacccttggaaggggcaagctggcaagacttcttgaggaacaacgctaagtccatgagatgcgctttgctcagtcaccgtgatggagccaaggtctgtctaggtacgggcttcacggagcaacagtatgaaactgctgagaacagccttgccttcctgacacaacaaggtttctcccttgagaacgccctctacgcaatgcaagctgttgggatctacactctgggttgcgcgttgctggatcaagagctgcaagtcgctaaggaggagagggaaacacctactactgatagtatgccgccactggttcgacaagctctggaactcaaggatcaccaaggtgcagagccagccttcctgttcggccttgaactgatcataagcggattggagaagcagctgaagcgtgaaagtgggtct

SEQ ID NO: 1201 - DNA, 621 bp, Artificial Sequence; identical to SEQ ID NO: 824
  synthetic construct; nucleotides encoding sulfonylurea responsive repressor

SEQ ID NO: 1202 - DNA, 621 bp, Artificial Sequence
  synthetic construct; nucleotides encoding sulfonylurea responsive repressor
atggccagactcgacaagagcaaggtgatcaacagcgcactggagctgctgaacgaggtcggaatcgaaggcctcacaacccgtaagctcgcccagaagctcggggttgagcagcctacattgtactggcacgtcaagaacaagcgagctctgctagacgctatggccattgagatgctcgataggcacgctacccactacctacctttggaaggggcaagctggcaagacttcttgaggaacaaagctaagtccatgagacgtgctttgctcagtcaccgtgatggagccaaggtctgtctaggtacgggcttcacggagcaacagtatgaaactgctgagaacagccttgccttcctgacgcaacaaggtttctcccttgagaacgccctctacgcaatgcaagctgttgggatctacactctgggttgtgtcttgctgaatcaagagctgcaagtcgctaaggaggagagggaaacacctactactgatagtatgccgccactggttcgacaagctctggaactcaaggatcaccaaggtgcagagccagccttcctgttcggccttgaactgatcatagcaggattggagaagcagctgaaggccgaaagtgggtct

SEQ ID NO: 1203 - DNA, 621 bp, Artificial Sequence
  synthetic construct; nucleotides encoding sulfonylurea responsive repressor
atggccagactcgacaagagcaaggtgatcaacagcgcactggagctgctgaacgaggtcggaatcgaaggcctcacaacccgtaagctcgcccagaagctcggggttgagcagcctacattgtactggcacgtcaagaacaagcgagctctgctagacgctatggccattgagatgctcgataggcacgctacccactactgtcctttggaaggggaaagctggcaagacttcttgaggaacaaagctaagtccatgagaaatgctttgctcagtcaccgtgatggagccaaggtgtgtctaggtacgggcttcacggagcaacagtatgaaactgctgagaacagccttgccttcctgacacaacaaggtttctcccttgagaacgccctctacgcaatgcaagctgttgggatctacactctgggttgtgtcttgctggatcaagagctgcaagtcgctaaggaggagagggaaacacctactactgatagtatgccgccactggttcgacaagctctggaactcaaggatcaccaaggtgcagagccagccttcctgttcggccttgaactgatcatagcaggattggagaagcagctgaaggctgaaagtgggtct

SEQ ID NO: 1204 - DNA, 621 bp, Artificial Sequence; identical to SEQ ID NO: 821
  synthetic construct; nucleotides encoding sulfonylurea responsive repressor

SEQ ID NO: 1205 - DNA, 621 bp, Artificial Sequence
  synthetic construct; nucleotides encoding sulfonylurea responsive repressor
atggccagactcgacaagagcaaggtgatcaacagcgcactggagctgctgaacgaggtcggaatcgaaggcctcacaacccgtaagctcgcccagaagctcggggttgagcagcctacattgtactggcacgtcaagaacaagcgagctctgctagacgctatggccattgagatgctcgatccccacgctacccactactctcctttggaaggggaaagctggcaagacttcttgaggaacaaagctaagtccatgagatgcgctttgctcagtcaccgtgatggagccaaggtctgtctaggtacgggcttcacggagcaacagtatgaaactgctgagaacagccttgccttcctgtgtcaacaaggtttctcccttgagaacgccctctacgcaatgcaagctgttgggatctacactctgggttcggcgttgctggatcaagagctgcaagtcgctaaggaggagagggaaacacctactactgatagtatgccgccactggtacgacaagctctgaacctcaaggatcaccaaggtgcagagccagccttcctgttcggccttgaactgatcatacgcggattggagaagcagctgaagtgtgaaagtgggtct

SEQ ID NO: 1206 - DNA, 621 bp, Artificial Sequence
  synthetic construct; nucleotides encoding sulfonylurea responsive repressor
atggccagactcgacaagagcaaggtgatcaacagcgcactggagctgctgaacgaggtcggaatcgaaggcctcacaacccgtaagctcgcccagaagctcggggttgagcagcctacattgtactggcacgtcaagaacaagcgagctctgctagacgctatggccattgagatgctcgataggcacgctacccactactctcctttggaacgggaaagctggcaaaatttcttgaggaacaacgctaagtccatgagaaatgctttgctcagtcaccgtgatggagccaaggtctgtctaggtacgggcttcacggagcaacagtatgaaactgctgagaactcacttgccttcctgacacaacaaggtttctcccttgagaacgccctctacgcaatgcaagctgttgggatctacactctgggttgtgtgttgctggatcaagagctgcaagtcgctaaggaggagagggaaacacctactactgatagtatgccgccactggttcgacaagctgtggaactcaaggatcaccaaggtgcagagccagccttcctgttcggccttgaactgatcatagcaggattggagaagcagctgaagtgtgaaagtgggtct

SEQ ID NO: 1207 - DNA, 621 bp, Artificial Sequence
  synthetic construct; nucleotides encoding sulfonylurea responsive repressor
atggccagactcgacaagagcaaggtgatcaacagcgcactggagctgctgaacgaggtcggaatcgaaggcctcacaacccgtaagctcgcccagaagctcggggttgagcagcctacattgtactggcacgtcaagaacaagcgagctctgctagacgctatggccattgagatgctcaacaggcacgctacccagtactgtcctttggagggggaaagctggcaaaatttcttgaggaacaacgctaagtccatgagatgcgctttgctcagtcaccgtgatggagccaaggtctgtctaggtacgggcttcacggagcaacagtatgaaactgctgagaacagccttgccttcctgacacaacaaggtttctcccttgagaacgccctctacgcaatgcaagctgttgggatctacactctgggttgtgtcttgctggatcaagagctgcaagtcgctaaggaggagagggaaacacctactactgatagtatgccgccactggttcgacaagctgtggaactcaaggatcaccaaggtgcagagccagccttcctgttcggccttgaactgatcataagcggattggagaagcagctgaagcgtgaaagtgggtct

SEQ ID NO: 1208 - DNA, 624 bp, Artificial Sequence
  synthetic construct; nucleotides encoding sulfonylurea responsive repressor
atgggatctagattagataaaagtaaagtgattaacagcgcattagagctgcttaatgaggtcggaatcgaaggtttaacaacccgtaaactcgcccagaagctaggtgtagagcagcctacattgtattggcatgtaaaaaataagcgagctctgctagacgctatggccttcgagatgctcgatcgccacgctatacactatttaccattggaaggggaaagctggcaaaatttcttgaggaacaacgctaagtccatgagaaacgctttgctcagtcaccgtgatggagccaaggtctgtctaggtacgggcttcacggagcaacaatatgaaactgcggagaaccgccttgccttcctgacacaacatggtttctcccttgagcaggccctctacgcatggcaagcagtggggatctacactctgggttgtgtcttgctggatcaacagctgcaagtcgctaaggaggagagggaaacacctactactgatagtatgccgccactggttcgacaagcttgggaactcaaggatcaccaaggtgcagagccagccttcctgttcggccttgaactgatcatatcaggattggagaagcagctgaaggcagaaagtgggtct

SEQ ID NO: 1209 - DNA, 624 bp, Artificial Sequence
  synthetic construct; nucleotides encoding sulfonylurea responsive repressor
atgggatctagattagataaaagtaaagtgattaacagcgcattagagctgcttaatgaggtcggaatcgaaggtttaacaacccgtaaactcgcccagaagctaggtgtagagcagcctacattgtattggcatgtaaaaaataagcgagctctgctagacgctatggccttcgagatgctcgatcgccacgctatacactatttaccattggaaggggaaagctggcaaaatttcttgaggaacaacgctaagtccatgagaaacgctttgctcagtcaccgtgatggagccaaggtctctctaggtacgggcttcacggagcaacaatatgaaactgcggagaaacgccttgccttcctgacacaacaaggtttctcccttgagaacgccctctacgcatggcaagcagtggggatctacactctgggttgtgtcttgctggatcaagagctgcaagtcgctaaggaggagagggaaacacctactactgatagtatgccgccactggttcgacaagcttgggaactcaaggatcaccaaggtgcagagccagccttcctgttcggccttgaactgatcatatcaggattggagaagcagctgaaggcagaaagtgggtct

SEQ ID NO: 1210 - DNA, 624 bp, Artificial Sequence
  synthetic construct; nucleotides encoding sulfonylurea responsive repressor
atgggatctagattagataaaagtaaagtgattaacagcgcattagagctgcttaatgaggtcggaatcgaaggtttaacaacccgtaaactcgcccagaagctaggtgtagagcagcctacattgtattggcatgtaaaaaataagcgagctctgctagacgctatggccatcgagatgctcgatcgccacgctatacactatttaccattggaaggggcaagctggcaaaatttcttgaggaacaacgctaagtccatgagaaacgctttgctcagtcaccgtgatggagccaaggtctgtctaggtacgggcttcacggagcaacaatatgaaactgcggagaactgccttgccttcctgacacaacaaggtttctcccttgagaacgccctctacgcatggcaagcagtggggatctacactctgggttgtgtcttgctggatcaagagctgcaagtcgctaaggaagagagggaaacacctactactgatagtatgccgccactggttcgacaagcttgggcactcaaggatcaccaaggtgcagagccagccttcctgttcggccttgaactgatcatatcaggattggagaagcagctgaaggcagaaagtgggtct

SEQ ID NO: 1211 - DNA, 624 bp, Artificial Sequence
  synthetic construct; nucleotides encoding sulfonylurea responsive repressor
atgggatctagattagataaaagtaaagtgattaacagcgcattagagctgcttaatgaggtcggaatcgaaggtttaacaacccgtaaactcgcccagaagctaggtgtagagcagcctacattgtattggcatgtaaaaaataagcgagctctgctagacgctatggccttcgagatgctcgatcgccacgctatacactttttaccattggaaggggcaagctggcaaaatttcttgaggaacaccgctaagtccatgagaaacgctttgctcagtcaccgtgatggagccaaggtctgtctaggtacgggcttcacggagcgacaatatgaaactgcggagaaccgccttgccttcctgacacaacaaggtttctcccttgagcaggccctctacgcatggcaagcagtggggatctacactctgggttgtgtcttgctggatcaagagctgcaagtcgctaaggaggagagggaaacacctactactgatagtatgccgccactggttcgacaagcttgggaactcaaggatcaccaaggtgcagagccagccttcctgttcggccttgaactgatcatatcaggattggagaagcagctgaaggcagaaagtgggtct

SEQ ID NO: 1212 - DNA, 624 bp, Artificial Sequence
  synthetic construct; nucleotides encoding sulfonylurea responsive repressor
atgggatctagattagataaaagtaaagtgattaacagcgcattagagctgcttaatgaggtcggaatcgaaggtttaacaacccgtaaactcgcccagaagctaggtgtagagcagcctacattgtattggcatgtaaaaaataagcgagctctgctagacgctatggccttcgagatgctcgatccccacgctatacactatttaccattggaaggggaaagctggcaaaatttcttgaggaaccatgctaagtccatgagaaacgctttgctcagtcaccgtgatggagccaaggtctgtctaggtacgggcttcacggagcaacaatatgaaactgcggagaaccgccttgccttcctgacacaacaaggtttctcccttgagaacgccctctacgcatggcaagcagtggggatctacactctgggttgtgtcttgctggatcaagagctgcaagtcgctaaggaggagagggaaacacctactactgatagtatgccgccactggttcgacaagcttgggaactcaaggatcaccaaggtgcagagccagccttcctgttcggccttgaactgatcatatcaggattggagaagcagctgaaggcagaaagtgggtct

SEQ ID NO: 1213 - DNA, 624 bp, Artificial Sequence
  synthetic construct; nucleotides encoding sulfonylurea responsive repressor
atgggatctagattagataaaagtaaagtgattaacagcgcattagagctgcttaatgaggtcggaatcgaaggtttaacaacccgtaaactcgcccagaagctaggtgtagagcagcctacattgtattggcatgtaaaaaataagcgagctctgctagacgctatggccatcgagatgctcgatcgccacgctatacactatttaccattggaaggggcaagctggcaaaatttcttgaggaacaacgctaagtccatgagaaacgctttgctcagtcaccgtgatggagccaaggtctgtctaggtacgggcttcacggagcaacaatatgaaactgcggagaaccgccttgccttcctgacacaacaaggtttctcccttgagcaggccctctacgcatggcaagcagtggggatctacactctgggttgtgtcttgctggatcaagagctgcaagtcgctaaggaggagagggaaacacctactaatgatagtatgccgccactggttcgacaagcttgggaactcaaggatcaccaaggtgcagagccagccttcctgttcggccttgaactgatcatatcaggattggagaagcagctgaaggcagaaagtgggtct

SEQ ID NO: 1214 - DNA, 624 bp, Artificial Sequence
  synthetic construct; nucleotides encoding sulfonylurea responsive repressor
atgggatctagattagataaaagtaaagtgattaacagcgcattagagctgcttaatgaggtcggaatcgaaggtttaacaacccgtaaactcgcccagaagctaggtgtagagcagcctacattgtattggcatgtaaaaaataagcgagctctgctagacgctatggccttcgagatgctcgatcgccacgctccccactttttactattggaaggggcaagctggcaaaatttcttgaggaacaaagctaagtccatgagaaacgctttgctcagtcaccgtgatggagccaaggtctgtctaggtacgggcttcacggagaaacaatatgaaactgcggagaacagccttgccttcctgacacaacaaggtttctcccttgagaacgccctctacgcatggcaagcagtggggatctacactctggggtgtgtcttgctggatcaagagctgcaagtcgctaaggaggagagggaaacacctactactgatagtatgccgccactggttcgacaagcttgggaactcaaggatcaccaaggtgcagagccagccttcctgttcggccttgaactgatcatatcaggattggagaagcagctgaaggcagaaagtgggtct

SEQ ID NO: 1215 - DNA, 624 bp, Artificial Sequence
  synthetic construct; nucleotides encoding sulfonylurea responsive repressor
atgggatctagattagataaaagtaaagtgattaacagcgcattagagctgcttaatgaggtcggaatcgaaggtttaacaacccgtaaactcgcccagaagctaggtgtagagcagcctacattgtattggcatgtaaaaaataagcgagctctgctagacgctatggccttcgagatgctcaatcgccacgctatacactatttaccattggaaggggaaagctggcaaaatttcttgaggaacaacgctaagtccatgagaaacgctttgctcagtcaccgtgatggagccaaggtctgtctaggtacgggcttcacggagcaacaatatgaaactgcggagaaccgccttgccttcctgacacaacaaggtttctcccttgagcaggccctctacgcatggcaagcagtggggatctacactctgggttgtgccttgctggatcaagagctgcaagtcgctaaggaggagagggaaacacctactactgatagtatgccgccactggttcgacaagcttgggaactcaaggatcaccaaggtgcagagccagccttcctgttcggccttgaactgatcatatcaggattggagaagcagctgaaggcagaaagtgggtct

SEQ ID NO: 1216 - DNA, 624 bp, Artificial Sequence
  synthetic construct; nucleotides encoding sulfonylurea responsive repressor
atgggatctagattagataaaagtaaagtgattaacagcgcattagagctgcttaatgaggtcggaatcgaaggtttaacaacccgtaaactcgcccagaagctaggtgtagagcagcctacattgtattggcatgtaaaaaataagcgagctctgctagacgctatggccatcgagatgctcgatcgccacgctatacactttttatcattggaaggggaaagctggcaaaatttcttgaggaacaaagctatgtccatgagaaacgctttgctcagtaaccgtgatggagccaaggtctgtctaggtacgggcttcacggagcaacaatatgaaactgcggagaacagccttgccttcctgacacaacaaggtttctcccttgagaacgccctctacgcatggcaagcagtggggatctacactctgggttgtgtcttgctggatcaagagctgcacgtcgctaaggaggagagggaaacacctactactgatagtatgccgccactggttcgacaagcttgggaactcaaggatcaccaaggtgcagagccagccttcctgttcggccttgaactgatcatatcaggattggagaagcagctgaaggcagaaagtgggtct

SEQ ID NO: 1217 - DNA, 621 bp, Artificial Sequence
  synthetic construct; nucleotides encoding sulfonylurea responsive repressor
atgggatctagattagataaaagtaaagtgattaacagcgcattagagctgcttaatgaggtcggaatcgaaggtttaacaacccgtaaactcgcccagaagctaggtgtagagcagcctacattgtattggcatgtaaaaaataagcgagctctgctagacgctatggccatcgagatgctcgatcgccacgctacccactatttaccattggaaggggcaagctggcaaaatttcttgaggaacaacgctaagtccatgagaaacgctttgctcagtcaccgtgatggagccaaggtctgtctaggtacgggcttcacggagcaacaatatgaaactgcggagaaccgccttgccttcctgacacaacaaggtttctcccttgagcaggccctctacgcatggcaagcagtggggatctacactctgggttgtgtcttgctggatcaagagctgcaagtcgctaaggaggagagggaaacacctactgatagtatgccgccactggttcgacaagcttgggaactcaaggatcaccaaggtgcagagccagccttcctgttcggccttgaactgatcatatcaggattggagaagcagctgaaggcagaaagtgggtct

SEQ ID NO: 1218 - DNA, 624 bp, Artificial Sequence
  synthetic construct; nucleotides encoding sulfonylurea responsive repressor
atgggatctagattagataaaagtaaagtgattaacagcgcattagagctgcttaatgaggtcggaatcgaaggtttaacaacccgtaaactcgcccagaagctaggtgtagagcagcctacattgtattggcatgtaaaaaataagcgagctctgctagacgctatggccttcgagatgctcgatcgccacgctccccactatttaccattggaaggggcaagctggcaaaatttcttgaggaacaacgctaagtccatgagaaacgctttgctcagtcaccgtgatggagccaaggtctgtctaggtacgggcttcacggagcaacaatatgaaactgcggagaaccaccttgccttcctgacacaacaaggtttctcccttgagaacgccctctacgcatggcaagcagtggggatctacactctgggttgtgtcttgctggatcaacagctgcaagtcgctaaggaggagagggaaacacctactactgatagtatgccgccactggttcgacaagcttgggaactcaaggatcaccaaggtgcagagccagccttcctgttcggccttgaactgatcatatcaggattggagaagcagctgaaggcagaaagtgggtct

SEQ ID NO: 1219 - DNA, 622 bp, Artificial Sequence
  synthetic construct; nucleotides encoding sulfonylurea responsive repressor
atgggatctagattagataaaagtaaagtgattaacagcgcattagagctgcttaatgaggtcggaatcgaaggtttaacaacccgtaaactcgcccagaagctaggtgtagagcagcctacattgtattggcatgtaaaaaataagcgagctctgctagacgctatggccatcgagatgctcgatcgccacgctacccactatttaccattggaaggggaaagctggcaaaatttcttgaggaacaacgctaagtccatgagaaacgctttgctcagtcaccgtgatggagccaaggtctgtctaggtacgggcttcacggagcaacaatatgaaactgcggagaaccgccttgccttcctgacacaacaaggtttctcccttgagaacgccctctacgcatggcaagcagtggggatctacactctgggttgtgtcttgctggatcaagagctgcaagtcgctaaggaggagagggaaacacctactactgatagtatgccgccactggttcgacaagcttgggaactcaaggatcaccaaggtgcagagccagccttcctgttcggccttgaactgatcatatcaggattggagaagagctgaaggagaaagtgggtct

SEQ ID NO: 1220 - DNA, 621 bp, Artificial Sequence
  synthetic construct; nucleotides encoding sulfonylurea responsive repressor
atggccagactcgacaagagcaaggtgatcaacagcgcactggagctgctgaacgaggtcggaatcgaaggcctcacaacccgtaagctcgcccagaagctcggggttgagcagcctacattgtactggcacgtcaagaacaagcgagctctgctagacgctatggccatcgagatgctcgatcgccacgctatacactatttaccattggaaggggcaagctggcaaaatttcttgaggaacaacgctaagtccatgagaaacgctttgctcagtcaccgtgatggagccaaggtctgtctaggtacgggcttcacggagcaacaatatgaaactgcggagaacagccttgccttcctgacacaacaaggtttctcccttgagcaggccctctacgcatggcaagcagtggggatctacactctgggttgtgtcttgctggatcaagagctgcaattcgctaaggaggagagggaaacacctactactgatagtatgccgccactggttcgacaagctgtagaactcaaggatcaccaaggtgcagagccagccttcctgttcggccttgaactgatcatatcaggattggagaagcagctgaaggcagaaagtgggtct

SEQ ID NO: 1221 - DNA, 621 bp, Artificial Sequence
  synthetic construct; nucleotides encoding sulfonylurea responsive repressor
atggccagactcgacaagagcaaggtgatcaacagcgcactggagctgctgaacgaggtcggaatcgaaggcctcacaacccgtaagctcgcccagaagctcggggttgagcagcctacattgtactggcacgtcaagaacaagcgagctctgctagacgctatggccatcgagatgctcgatcgccacgctatacactatttaccattggaaggggaaagctggcaaaatttcttgaggaacaacgctaagtccatgagaaacgctttgctcagtcaccgtgatggagccaaggtctgtctaggtacgggcttcacggagcaacaatatgaaactgcggagaaccgccttgccttcctgacacaacaaggtttctcccttgagaaggccctctacgcatggcaagcagtggggatctacactctgggttgtgtcttgctggatcaagagctgcaagtcgctaaggaggagagggaaacacctactactgatagtatgccgccactggttcgacaagcttgggaactcaaggatcaccaaggtgcagagccagccttcctgttcggccttgaacttatcatatcaggattggagaagcagctgaaggcagaaagtgggtct

SEQ ID NO: 1222 - DNA, 621 bp, Artificial Sequence
  synthetic construct; nucleotides encoding sulfonylurea responsive repressor
atggccagactcgacaagagcaaggtgatcaacagcgcactggagctgctgaacgaggtcggaatcgaaggcctcacaacccgtaagctcgcccagaagctcggggttgagcagcctacattgtactggcacgtcaagaacaagcgagctctgctagacgctatggccatcgagatgctcgatcgccacgctatacactatttaccattggaaggggaaagctggcaaaatttcttgaggaacaacgctaagtccatgagaaacgctttgctcagtcaccgtgatggagccaaggtctgtctaggtacgggcttcacggagcaacaatatgaaactgcggagaaccgccttgccttcctgacacaacaaggtttctcccttgagaacgccctctacgcatggcaagcagtggggatctacactctgggttgtgtcttgctggatcaagagctgcaagtcgctaaggaggagagggaaacacctactactgatagtatgccgccactggttcgacaagcttgggaactcaaggatcaccaaggtgcagagccagccttcctgttcggccttgaactgatcatatcaggattggagaagcagctgaaggcagaaagtgggtct

SEQ ID NO: 1223 - DNA, 621 bp, Artificial Sequence; identical to SEQ ID NO: 1222
  synthetic construct; nucleotides encoding sulfonylurea responsive repressor

SEQ ID NO: 1224 - DNA, 621 bp, Artificial Sequence; identical to SEQ ID NO: 1222
  synthetic construct; nucleotides encoding sulfonylurea responsive repressor

SEQ ID NO: 1225 - DNA, 621 bp, Artificial Sequence
  synthetic construct; nucleotides encoding sulfonylurea responsive repressor
atggccagactcgacaagagcaaggtgatcaacagcgcactggagctgctgaacgaggtcggaatcgaaggcctcacaacccgtaagctcgcccagaagctcggggttgagcagcctacattgtactggcacgtcaagaacaagcgagctctgctagacgctatggccttcgagatgctcgatcgccacgctacccactatttaccattggaaggggaaagctggcaaaatttcttgaggaacaacgctaagtccatgagaaacgctttgctcagtcaccgtgatggagccaaggtctgtctaggtacgggcttcacggagcgacaatatgaaactgcggagaaccgccttgccttcctgacacaacaaggtttctcccttgagaacgccctctacgcatggcaagcagtggggatctacactctgggttgtgtcttgctggatcaagagctgcaagtcgctaaggaggagagggaaacacctactactgatagtatgccgccactggttcgacaagcttgggaactcaaggatcaccaaggtgcagagccagccttcctgttcggccttgaactgatcatatcaggattggagaagcagctgaaggcagaaagtgggtct

SEQ ID NO: 1226 - DNA, 621 bp, Artificial Sequence
  synthetic construct; nucleotides encoding sulfonylurea responsive repressor
atggccagactcgacaagagcaaggtgatcaacagcgcactggagctgctgaacgaggtcggaatcgaaggcctcacaacccgtaagctcgcccagaagctcggggttgagcagcctacattgtactggcacgtcaagaacaagcgagctctgctagacgctatggccttcgagatgctcgatcgccacgctatacactatttaccattggaaggggcaagctggcaaaatttcttgaggaacaacgctaagtccatgagaaacgctttgctcagtcaccgtgatggagccaagctctgtcttggtacgggcttcacggagcaacaatatgaaactgcggagaaccgccttgccttcctgacacaacaaggtttctcccttgagcaggccctctacgcatggcaagcagtggggatctacactctgggttgtgtcttgctggatcaagagctgcaagtcgctaaggaggagagggaaacacctactactgatagtatgccgccactggttcgacaagcttgggaactcaaagatcaccaaggtgcagagccagccttcctgttcggccttgaactgatcatatcaggattggagaagcagctgaaggcagaaagtgggtct

SEQ ID NO: 1227 - DNA, 621 bp, Artificial Sequence
  synthetic construct; nucleotides encoding sulfonylurea responsive repressor
atggccagactcgacaagagcaaggtgatcaacagcgcactggagctgctgaacgaggtcggaatcgaaggcctcacaacccgtaagctcgcccagaagctcggggttgagcagcctacattgtactggcacgtcaagaacaagcgagctctgctagacgctatggctatcgagatgctcgatcgccacgctatacactatttaccattggaaggggaaagctggcaaaatttcttgaggaacaacgctaagtccatgagaaacgctttgctcagtcaccgtgatggagccaaggtctgtctaggtacgggcttcacggagcaacaatatgaaactgcggagaaccgccttgccttcctgacacaacaaggtttctcccttgagaacgccctctacgcatggcaagcagtggggatctacactctgggttgtgtcttgctggatcaagagctgcaagtcgctaaggaggagagggaaacacctactactgatagtatgccgccactggttcgacaagcttgggaactcaaggatcaccaaggtgcagagccagccttcctgttcggccttgaactgatcatatcaggattggagaagcagctgaaggcagaaagtgggtct

SEQ ID NO: 1228 - DNA, 621 bp, Artificial Sequence
  synthetic construct; nucleotides encoding sulfonylurea responsive repressor
atggccagactcgacaagagcaaggtgatcaacagcgcactggagctgctgaacgaggtcggaatcgaaggcctcacaacccgtaagctcgcccagaagctcggggttgagcagcctacattgtactggcacgtcaagaacaagcgagctctgctagacgctatggccatcgagatgctcgatcgccacgctatacactatttaccattggaaggggaaagctggcaaaatttcttgaggaacaacgctaagtccatgagaaacgctttgctcagtcaccgtgatggagccaaggtctgtctaggtacgggcttcacggagcaacaatatgaaactgcggagaaccgccttgccttcctgacacaacaaggtttctcccttgagcaggccctctacgcatggcaagcagtggggatctacactctgggttgtgtcttgctggatcaagagctgcaagtcgctaaggaggagagggaaacacctactactgatagtatgccgccactggttcgacaagcttgggaactcaaggatcaccaaggttcagagccagccttcctgttcggccttgaactgatcatatcaggattggagaagcagctgaaggcagaaagtgggtat

SEQ ID NO: 1229 - DNA, 621 bp, Artificial Sequence
  synthetic construct; nucleotides encoding sulfonylurea responsive repressor
atggccagactcgacaagagcaaggtgatcaacagcgcactggagctgctgaacgaggtcggaatcgaaggcctcacaacccgtaagctcgcccagaagctcggggttgagcagcctacattgtactggcacgtcaagaacaagcgagctctgctagacgctatggccatcgagatgctcgatcgccacgctatacactatttaccattggaaggggaaagctggcaaaatttcttgaggaacaacgctaagtccatgagaaacgctttgctcagtcaccgtgatggagccaaggtctgtctaggtacgggcttcacggagcaacaatatgaaactgcggagaaccgccttgccttcctgacacaacaaggtttctcccttgagaacgccctctacgcatggcaagcagtggggatctacactctgggttgtgtcttgctggatcaagagctgcaagtcgctaaggaggagagggaaacacctactactgatagtatgccgccactggttcgacaagctttagaactcaaggatcaccaaggtgcagagccagccttcctgttcggccttgaactgatcatatcaggattggagaagcagctgaaggcagaaagtgggtct

SEQ ID NO: 1230 - DNA, 618 bp, Artificial Sequence
  synthetic construct; nucleotides encoding sulfonylurea responsive repressor
atggccagactcgacaagagcaaggtgatcaacagcgcactggagctgctgaacgaggtcggaatcgaaggcctcacaacccgtaagctcgcccagaagctcggggttgagcagcctacattgtactggcacgtcaagaacaagcgagctctgctagacgctatggccatcgagatgctcgatcgccacgctatacactatttaccattggaaggggaaagctggcaaaatttcttgaggaacaacgctaagtccatgagaaacgctttgctcagtcaccgtgatggagccaaggtctgtctaggtacgggcttcacggagcaacaatatgaaactgcggagaaccgccttgccttcctgacacaacaaggtttctcccttgagcaggccctctacgcatggcaagcagtggggatctacactctgggttgtgtcttgctggatcaagagctgcaagtcgctaaggaggagagggaaacacctactactgatagtatgccgccactggttcgacaagcttgggaactcaaggatcaccaaggtgcagagccagccttcctgttcggccttgaactgatcatatcaggattggagaagctgaaggcagaaagtgggtct

SEQ ID NO: 1231 - DNA, 621 bp, Artificial Sequence
  synthetic construct; nucleotides encoding sulfonylurea responsive repressor
atggccagactcgacaagagcaaggtgatcaacagcgcactggagctgctgaacgaggtcggaatcgaaggcctcacaacccgtaagctcgcccagaagctcggggttgagcagcctacattgtactggcacgtcaagaacaagcgagctctgctagacgctatggccatcgagatgctcgatcgccacgctacccactttttaccattggaaggggaaagctggcaaaatttcttgaggaacaacgctaagtccatgagaaacgctttgctcagtcaccgtgatggagccaaggtctgtctaggtacgggcttcacgaagcaacaatatgaaactgcggagaaccgccttgccttcctgacacaacaaggtttctcccttgagcaggccctctacgcatggcaagcagtggggatctacactctgggttgtgtcttgctggatcaagagctgcaagtcgctaaggaggagagggaaacacctactactgatagtatgccgccactggttcgacaagcttgggaactcaaggatcaccaaggtgcagagccagccttcctgttcggccttgaactgatcatatcaggattggagaagcagctgaaggcagaaagtgggtct

SEQ ID NO: 1232 - DNA, 624 bp, Artificial Sequence
  synthetic construct; nucleotides encoding sulfonylurea responsive repressor
atgggatctagattagataaaagtaaagtgattaacagcgcattagagctgcttaatgaggtcggaatcgaaggtttaacaacccgtaaactcgcccagaagctaggtgtagagcagcctacattgtattggcatgtaaaaaataagcgagctctgctagacgctatggccattgagatgttggataggcacaagacccactacctgcctttggaaggggaaagctggcaagacttcttgaggaacagggctaagtccatgagaaatgctttgctcagtcaccgtgatggagccaaggtcgctctaggtacgggcttcacggagcaacagtatgaaactatggagaactcgcttgccttcctgacacaacaaggtttctcccttgagaacgccctctacgcatttcaagctgttgggatctacactctgggttgcgtcttgctggatcaagagctgcaagtcgctaaggaggagagggaaacacctactactgatagtatgccgccactggttcgacaagcttacgaactcagagatcaccaaggtgcagagccagccttcctgttcggccttgaactgatcataagtggattggagaagcagctgaaggcagaaagtgggtct

SEQ ID NO: 1233 - DNA, 624 bp, Artificial Sequence
  synthetic construct; nucleotides encoding sulfonylurea responsive repressor
atgggatctagattagataaaagtaaagtgattaacagcgcattagagctgcttaatgaggtcggaatcgaaggtttaacaacccgtaaactcgcccagaagctaggtgtagagcagcctacattgtattggcatgtaaaaaataagcgagctctgctagacgctatggccattgagatgttcgataggcacaagacccactacctgcctttggaaggggaaagctggcaagacttcttgaggaacaatgctaagtccaggagaaatgctttgctcagtcaccgtgatggagccaaggtcgctctaggtacgggcttcacggagcaacagtatgaaactatggagaactgtcttgccttcctgacacaacaaggtttctcccttgagaacgccctctacgcatttcaagctgttgggatctacactctgggttgcgtcttgctggatcaagagctgcaagtcgctaaggaggagagggaaacacctactactgatagtatgccgccactggttcgacaagcttacgaactcaaagatcaccaaggtgcagagccagccttcctgttcggccttgaactgatcatatgtggattggagaagcagctgaagtgtgaaagtgggtct

SEQ ID NO: 1234 - DNA, 624 bp, Artificial Sequence
  synthetic construct; nucleotides encoding sulfonylurea responsive repressor
atgggatctagattagataaaagtaaagtgattaacagcgcattagagctgcttaatgaggtcggaatcgaaggtttaacaacccgtaaactcgcccagaagctaggtgtagagcagcctacattgtattggcatgtaaaaaataagcgagctctgctagacgctatggccattgagatgttggataggcacgacacccactacctgcctttggaaggggaaagctggcaagacttcttgaggaacaatgctaagtccaggagaaatgctttgctcagtcaccgtgatggagccaaggtcgctctaggtacgggcttcacggagcaacagtatgaaactatggagaactctcttgccttcctgacacaacaaggtttctcccttgagaacgccctctacgcaatgcaagctgttgggatctacactctgggttgcgtcttgctggatcaagagctgcaagtcgctaaggaggagagggaaacacctactactgatagtatgccgccactggttcgacaagcttacgaactcaaagatcaccaaggtgcagagccagccttcctgttcggccttgaactgatcatatgtggattggagaagcagctgaagtgtgaaagtgggtct

SEQ ID NO: 1235 - DNA, 624 bp, Artificial Sequence
  synthetic construct; nucleotides encoding sulfonylurea responsive repressor
atgggatctagattagataaaagtaaagtgattaacagcgcattagagctgcttaatgaggtcggaatcgaaggtttaacaacccgtaaactcgcccagaagctaggtgtagagcagcctacattgtattggcatgtaaaaaataagcgagctctgctagacgctatggccattgagatgttcgataggcacgccacccactacctgcctttggaaggggaaagctggcaagacttcttgaggaacagggctaagtccaggagaaatgctttgctcagtcaccgtgatggagccaaggtcgctctaggtacgggcttcacggagcaacagtatgaaactgctgagaactggcttgccttcctgacacaacaaggtttctcccttgagaacgccctctacgcaatgcaagctgttgggatctacactctgggttgcgtcttgctggatcaagagctgcaagtcgctaaggaggagagggaaacacctactactgatagtatgccgccactggttcgacaagcttacgaactcaaagatcaccaaggtgcagagccagccttcctgttcggccttgaactgatcatttgtggattggagaagcagctgaagtgtgaaagtgggtct

SEQ ID NO: 1236 - DNA, 624 bp, Artificial Sequence
  synthetic construct; nucleotides encoding sulfonylurea responsive repressor
  misc_feature (351)..(351): n is a, c, g, or t
atgggatctagattagataaaagtaaagtgattaacagcgcattagagctgcttaatgaggtcggaatcgaaggtttaacaacccgtaaactcgcccagaagctaggtgtagagcagcctacattgtattggcatgtaaaaaataagcgagctctgctagacgctatggccattgagatgttggataggcacaagacccactactgtcctttggaaggggaaagctggcaagacttcttgaggaacagggctaagtccaggagaaatgctttgctcagtcaccgtgatggagccaaggtctgcctaggtacgggcttcacggagcaacagtatgaaactgctgagaactgncttgccttcctgacacaacaaggtttctcccttgagaacgccctctacgcaatgcaagctgttgggatctacactctgggttgcgtcttgctggatcaagagctgcaagtcgctaaggaggagagggaaacacctactactgatagtatgccgccactggttcgacaagctctcgaactccacgatcaccaaggtgcagagccagccttcctgttcggccttgaactgatcatatgtggattggagaagcagctgaaggcagaaagtgggtct

SEQ ID NO: 1237 - DNA, 624 bp, Artificial Sequence
  synthetic construct; nucleotides encoding sulfonylurea responsive repressor
atgggatctagattagataaaagtaaagtgattaacagcgcattagagctgcttaatgaggtcggaatcgaaggtttaacaacccgtaaactcgcccagaagctaggtgtagagcagcctacattgtattggcatgtaaaaaataagcgagctctgctagacgctatggccattgagatgttggataggcacgccacccactacctgcctttggaaggggaaagctggcaagacttcttgaggaacaaggctaagtccatgagaaatgctttgctcagtcaccgtgatggagccaaggtcgctctaggtacgggcttcacggagcaacagtatgaaactgctgagaactctcttgccttcctgacacaacaaggtttctcccttgagaacgccctctacgcaatgcaagctgttgggatctacactctgggttgcgtcttgctggatcaagagctgcaagtcgctaaggaggagagggaaacacctactactgatagtatgccgccactggttcgacaagctctcgaactccacgatcaccaaggtgcagagccagccttcctgttcggccttgaactgatcataagtggattggagaagcagctgaaggcagaaagtgggtct

SEQ ID NO: 1238 - DNA, 624 bp, Artificial Sequence
  synthetic construct; nucleotides encoding sulfonylurea responsive repressor
atgggatctagattagataaaagtaaagtgattaacagcgcattagagctgcttaatgaggtcggaatcgaaggtttaacaacccgtaaactcgcccagaagctaggtgtagagcagcctacattgtattggcatgtaaaaaataagcgagctctgctagacgctatggccattgagatgttcgataggcacgccacccactacctgcctttggaaggggaaagctggcaagacttcttgaggaacagggctaagtccatgagaaatgctttgctcagtcaccgtgatggagccaaggtcgctctaggtacgggcttcacggagcaacagtatgaaactgctgagaactcgcttgccttcctgacacaacaaggtttctcccttgagaacgccctctacgcatttcaagctgttgggatctacactctgggttgcgtcttgctggatcaagagctgcaagtcgctaaggaggagagggaaacacctactactgatagtatgccgccactggttcgacaagctctcgaactccacgatcaccaaggtgcagagccagccttcctgttcggccttgaactgatcataagtggattggagaagcagctgaagtgtgaaagtgggtct

SEQ ID NO: 1239 - DNA, 624 bp, Artificial Sequence
  synthetic construct; nucleotides encoding sulfonylurea responsive repressor
atgggatctagattagataaaagtaaagtgattaacagcgcattagagctgcttaatgaggtcggaatcgaaggtttaacaacccgtaaactcgcccagaagctaggtgtagagcagcctacattgtattggcatgtaaaaaataagcgagctctgctagacgctatggccattgagatgttggataggcacgccacccactacctgcctttggaaggggaaagctggcaagacttcttgaggaacagggctaagtccatgagaaatgctttgctcagtcaccgtgatggagccaaggtcgctctaggtacgggcttcacggagcaacagtatgaaactatggagaactcgcttgccttcctgacacaacaaggtttctcccttgagaacgccctctacgcaatgcaagctgttgggatctacactctgggttgcgtcttgctggatcaagagctgcaagtcgctaaggaggagagggaaacacctactactgatagtatgccgccactggttcgacaagcttacgaactcagagatcaccaaggtgcagagccagccttcctgttcggccttgaactgatcataagtggattggagaagcagctgaagtgtgaaagtgggtct

SEQ ID NO: 1240 - DNA, 624 bp, Artificial Sequence
  synthetic construct; nucleotides encoding sulfonylurea responsive repressor
atgggatctagattagataaaagtaaagtgattaacagcgcattagagctgcttaatgaggtcggaatcgaaggtttaacaacccgtaaactcgcccagaagctaggtgtagagcagcctacattgtattggcatgtaaaaaataagcgagctctgctagacgctatggccattgagatgttggataggcacgccacccactactgtcctttggaaggggaaagctggcaagacttcttgaggaacaaggctaagtccatgagaaatgctttgctcagtcaccgtgatggagccaaggtcgctctaggtacgggcttcacggagcaacagtatgaaactatggagaactcgcttgccttcctgacacaacaaggtttctcccttgagaacgccctctacgcatttcaagctgttgggatctacactctgggttgcgtcttgctggatcaagagctgcaagtcgctaaggaggagagggaaacacctactactgatagtatgccgccactggttcgacaagcttacgaactcaaagatcaccaaggtgcagagccagccttcctgttcggccttgaactgatcatatgtggattggagaagcagctgaaggcagaaagtgggtct

SEQ ID NO: 1241 - DNA, 624 bp, Artificial Sequence
  synthetic construct; nucleotides encoding sulfonylurea responsive repressor
atgggatctagattagataaaagtaaagtgattaacagcgcattagagctgcttaatgaggtcggaatcgaaggtttaacaacccgtaaactcgcccagaagctaggtgtagagcagcctacattgtattggcatgtaaaaaataagcgagctctgctagacgctatggccattgagatgttcgataggcacgacacccactactgtcctttggaaggggaaagctgtcaagacttcttgaggaacaaggctaagtccatgagaaatgctttgctcagtcaccgtgatggagccaaggtcgctctaggtacgggcttcacggagcaacagtatgaaactgctgagaactctcttgccttcctgacacaacaaggtttctcccttgagaacgccctctacgcatttcaagctgttgggatctacactctgggttgcgtcttgctggatcaagagctgcaagtcgctaaggaggagagggaaacacctactactgatagtatgccgccactggttcgacaagctatcgaactccacgatcaccaaggtgcagagccagccttcctgttcggccttgaactgatcataagtggattggagaagcagctgaagtgtgaaagtgggtct

SEQ ID NO: 1242 - DNA, 624 bp, Artificial Sequence
  synthetic construct; nucleotides encoding sulfonylurea responsive repressor
atgggatctagattagataaaagtaaagtgattaacagcgcattagagctgcttaatgaggtcggaatcgaaggtttaacaacccgtaaactcgcccagaagctaggtgtagagcagcctacattgtattggcatgtaaaaaataagcgagctctgctagacgctatggccattgagatgttggataggcacgccacccactactgtcctttggaaggggaaagctggcaagacttcttgaggaacaaggctaagtccatgagaaatgctttgctcagtcaccgtgatggagccaaggtcgctctaggtacgggcttcacggagcaacagtatgaaactatggagaactctcttgccttcctgacacaacaaggtttctcccttgagaacgccctctacgcaatgcaagctgttgggatctacactctgggttgcgtcttgctggatcaagagctgcaagtcgctaaggaggagagggaaacacctactactgatagtatgccgccactggttcgacaagcttacgaactcaaagatcaccaaggtgcagagccagccttcctgttcggctttgaactgatcatatgtggattggagaagcagctgaagtgtgaaagtgggtct

SEQ ID NO: 1243 - DNA, 624 bp, Artificial Sequence
  synthetic construct; nucleotides encoding sulfonylurea responsive repressor
atgggatctagattagataaaagtaaagtgattaacagcgcattagagctgcttaatgaggtcggaatcgaaggtttaacaacccgtaaactcgcccagaagctaggtgtagagcagcctacattgtattggcatgtaaaaaataagcgagctctgctagacgctatggccattgagatgttcgataggcacgacacccactactgtcctttggaaggggaaagctggcaagacttcttgaggaacaatgctaagtccaggagaaatgctttgctcagtcaccgtgatggagccaaggtcgctctaggtacgggcttcacggagcaacagtatgaaactatggagaactctcttgccttcctgacacaacaaggtttctcccttgagaacgccctctacgcatttcaagctgttgggatctacactctgggttgcgtcttgctggatcaagagctgcaagtcgctaaggaggagagggaaacacctactactgatagtatgccgccactggttcgacaagcttaccaactcaaagatcaccaaggtgcagagccagccttcctgttcggccttgaactgatcatatgtggattggagaagcagctgaaggcagaaagtgggtct

SEQ ID NO: 1244 - DNA, 624 bp, Artificial Sequence
  synthetic construct; nucleotides encoding sulfonylurea responsive repressor
atgggatctagattagataaaagtaaagtgattaacagcgcattagagctgcttaatgaggtcggaatcgaaggtttaacaacccgtaaactcgcccagaagctaggtgtagagcagcctacattgtattggcatgtaaaaaataagcgagctctgctagacgctatggccattgagatgttggataggcacaagacccactactgtcctttggaaggggaaagctggcaagacttcttgaggaacaaggctaagtccatgagaaatgctttgctcagtcaccgtgatggagccaaggtcgctctaggtacgggcttcacggagcaacagtatgaaactgctgagaactgtcttgccttcctgacacaacaaggtttctcccttgagaacgccctctacgcatttcaagctgttgggatctacactctgggttgcgtcttgctggatcaagagctgcaagtcgctaaggaggagagggaaacacctactactgatagtatgccgccactggttcgacaagctttcgaactcaaagatcaccaaggtgcagagccagccttcctgttcggccttgaactgatcatatgtggattggagaagcagctgtagtgtgaaagtgggtct

SEQ ID NO: 1245 - DNA, 624 bp, Artificial Sequence
  synthetic construct; nucleotides encoding sulfonylurea responsive repressor
atgggatctagattagataaaagtaaagtgattaacagcgcattagagctgcttaatgaggtcggaatcgaaggtttaacaacccgtaaactcgcccagaagctaggtgtagagcagcctacattgtattggcatgtaaaaaataagcgagctctgctagacgctatggccattgagatgttggataggcacaagacccactacctgcctttggaaggggaaagctggcaagacttcttgaggaacaaggctaagtccatgagaaatgctttgctcagtcaccgtgatggagccaaggtcgctctaggtacgggcttcacggagcaacagtatgaaactgctgagaactcgcttgccttcctgacacaacaaggtttctcccttgagaacgccctctacgcatttcaagctgttgggatctacactctgggttgcgtcttgctggatcaagagctgcaagtcgctaaggaggagagggaaacacctactactgatagtatgccgccactggttcgacaagctctcgaactccacgatcaccaaggtgcagagccagccttcctgttcggccttgaactgatcataagtggattggagaagcagctgaaggcagaaagtgggtct

SEQ ID NO: 1246 - DNA, 624 bp, Artificial Sequence
  synthetic construct; nucleotides encoding sulfonylurea responsive repressor
atgggatctagattagataaaagtaaagtgattaacagcgcattagagctgcttaatgaggtcggaatcgaaggtttaacaacccgtaaactcgcccagaagctaggtgtagagcagcctacattgtattggcatgtaaaaaataagcgagctctgctagacgctatggccattgagatgttggataggcacgacacccactactgtcctttggaaggggaaagctggcaagacttcttgaggaacaaggctaagtccatgagaaatgctttgctcagtcaccgtgatggagccaaggtcgctctaggtacgggcttcacggagcaacagtatgaaactgctgagaactgtcttgccttcctgacacaacaaggtttctcccttgagaacgccctctacgcatttcaagctgttgggatctacactctgggttgcgtcttgctggatcaagagctgcaagtcgctaaggaggagagggaaacacctactactgatagtatgccgccactggttcgacaagctatcgaactccacgatcaccaaggtgcagagccagccttcctgttcggccttgaactgatcataagtggattggagaagcagctgaagtgtgaaagtgggtct

SEQ ID NO: 1247 - DNA, 624 bp, Artificial Sequence
  synthetic construct; nucleotides encoding sulfonylurea responsive repressor
atgggatctagattagataaaagtaaagtgattaacagcgcattagagctgcttaatgaggtcggaatcgaaggtttaacaacccgtaaactcgcccagaagctaggtgtagagcagcctacattgtattggcatgtaaaaaataagcgagctctgctagacgctatggccattgagatgttcgataggcacaagacccactactgtcctttggaaggggaaagctggcaagacttcttgaggaacagggctaagtccatgagaaatgctttgctcagtcaccgtgatggagccaaggtcgctctaggtacgggcttcacggagcaacagtatgaaactatggagaactcgcttgccttcctgacacaacaaggtttctcccttgagaacgccctctacgcaatgcaagctgttgggatctacactctgggttgcgtcttgctggatcaagagctgcaagtcgctaaggaggagagggaaacacctactactgatagtatgccgccactggttcgacaagcttacgaactcaaagatcaccaaggtgcagagccagccttcctgttcggccttgaactgatcatatgtggattggagaagcagctgaaggcagaaagtgggtct

SEQ ID NO: 1248 - DNA, 624 bp, Artificial Sequence
  synthetic construct; nucleotides encoding sulfonylurea responsive repressor
atgggatctagattagataaaagtaaagtgattaacagcgcattagagctgcttaatgaggtcggaatcgaaggtttaacaacccgtaaactcgcccagaagctaggtgtagagcagcctacattgtattggcatgtaaaaaataagcgagctctgctagacgctatggccattgagatgttcgataggcacgccacccactacctgcctttggaaggggaaagctggcaagacttcttgaggaacagggctaagtccatgagaaatgctttgctcagtcaccgtgatggagccaaggtcgctctaggtacgggcttcacggagcaacagtatgaaactatggagaactcgcttgccttcctgacacaacaaggtttctcccttgagaacgccctctacgcaatgcaagctgttgggatctacactctgggttgcgtcttgctggatcaagagctgcaagtcgctaaggaggagagggaaacacctactactgatagtatgccgccactggttcgacaagctatcgaactccacgatcaccaaggtgcagagccagccttcctgttcggccttgaactgatcataagtggattggagaagcagctgaaggcagaaagtgggtct

SEQ ID NO: 1249 - DNA, 624 bp, Artificial Sequence
  synthetic construct; nucleotides encoding sulfonylurea responsive repressor
atgggatctagattagataaaagtaaagtgattaacagcgcattagagctgcttaatgaggtcggaatcgaaggtttaacaacccgtaaactcgcccagaagctaggtgtagagcagcctacattgtattggcatgtaaaaaataagcgagctctgctagacgctatggccattgagatgttcgataggcacaagacccactacctgcctttggaaggggaaagctggcaagacttcttgaggaacaatgctaagtccaggagaaatgctttgctcagtcaccgtgatggagccaaggtcgctctaggtacgggcttcacggagcaacagtatgaaactatggagaactcgcttgccttcctgacacaacaaggtttctcccttgagaacgccctctacgcaatgcaagctgttgggatctacactctgggttgcgtcttgctggatcaagagctgcaagtcgctaaggaggagagggaaacacctactactgatagtatgccgccactggttcgacaagcttacgaactcaaagatcaccaaggtgcagagccagccttcctgttcggccttgaactgatcatatgtggattggagaagcagctgaagtgtgaaagtgggtct

SEQ ID NO: 1250 - DNA, 624 bp, Artificial Sequence
  synthetic construct; nucleotides encoding sulfonylurea responsive repressor
atgggatctagattagataaaagtaaagtgattaacagcgcattagagctgcttaatgaggtcggaatcgaaggtttaacaacccgtaaactcgcccagaagctaggtgtagagcagcctacattgtattggcatgtaaaaaataagcgagctctgctagacgctatggccattgagatgttcgataggcacgccacccactacctgcctttggaaggggaaagctggcaagacttcttgaggaacaatgctaagtccaggagaaatgctttgctcagtcaccgtgatggagccaaggtcgctctaggtacgggcttcacggagcaacagtatgaaactatggagaactcgcttgccttcctgacacaacaaggtttctcccttgagaacgccctctacgcatttcaagctgttgggatctacactctgggttgcgtcttgctggatcaagagctgcaagtcgctaaggaggagagggaaacacctactactgatagtatgccgccactggttcgacaagcttacgaactcaaagatcaccaaggtgcagagccagccttcctgttcggccttgaactgatcatatgtggattggagaagcagctgaagtgtgaaagtgggtct

SEQ ID NO: 1251 - DNA, 622 bp, Artificial Sequence
  synthetic construct; nucleotides encoding sulfonylurea responsive repressor
atgggatctagattagataaaagtaaagtgattaacagcgcattagagctgcttaatgaggtcggaatcgaaggtttaacaacccgtaaactcgcccagaagctaggtgtagagcagcctacattgtattggcatgtaaaaaataagcgagctctgctagacgctatggccattgagatgttcgataggcacgacacccactacctgcctttggaaggggaaagctggcaagacttcttgaggaacaaggctaagtccatgagaaatgctttgctcagtcaccgtgatggagccaaggtcgctctaggtacgggcttcacggagcaacagtatgaaactatggagaactcgcttgccttcctgacacaacaaggtttctcccttgagaacgccctctacgcaatgcaagctgttgggatctacactctgggttgcgtcttgctggatcaagagctgcaagtcgctaaggaggagagggaaacacctactactgatagtatgccgccactggttcgacaagctatcgaactccacgatcaccaaggtgcagagccagccttcctgttcggccttgaacagatcataagtggattggagaagcagctgaaggcagaaagtgtct

SEQ ID NO: 1252 - DNA, 624 bp, Artificial Sequence
  synthetic construct; nucleotides encoding sulfonylurea responsive repressor
atgggatctagattagataaaagtaaagtgattaacagcgcattagagctgcttaatgaggtcggaatcgaaggtttaacaacccgtaaactcgcccagaagctaggtgtagagcagcctacattgtattggcatgtaaaaaataagcgagctctgctagacgctatggccattgagatgttcgataggcacgacacccactactgtcctttggaaggggaaagctggcaagacttcttgaggaacaatgctaagtccaggagaaatgctttgctcagtcaccgtgatggagccaaggtcgctctaggtacgggcttcacggagcaacagtatgaaactatggagaactctcttgccttcctgacacaacaaggtttctcccttgagaacgccctctacgcatttcaagctgttgggatctacactctgggttgcgtcttgctggatcaagagctgcaagtcgctaaggaggagagggaaacacctactactgatagtatgccgccactggttcgacaagcttacgaactcaaagatcaccaaggtgcagagccagccttcctgttcggccttgaactgatcataagtggattggagaagcagctgaagtgtgaaagtgggtct

SEQ ID NO: 1253 - DNA, 624 bp, Artificial Sequence
  synthetic construct; nucleotides encoding sulfonylurea responsive repressor
atgggatctagattagataaaagtaaagtgattaacagcgcattagagctgcttaatgaggtcggaatcgaaggtttaacaacccgtaaactcgcccagaagctaggtgtagagcagcctacattgtattggcatgtaaaaaataagcgagctctgctagacgctatggccattgagatgttggataggcacgacacccactactgtcctttggaaggggaaagctggcaagacttcttgaggaacaaggctaagtccatgagaaatgctttgctcagtcaccgtgatggagccaaggtcgctctaggtacgggcttcacggagcaacagtatgaaactgctgagaactcgcttgccttcctgacacaacaaggtttttcccttgagaacgccctctacgcatttcaagctgttgggatctacactctgggttgcgtcttgctggatcaagagctgcaagtcgctaaggaggagagggaaacacctactactgatagtatgccgccactggttcgacaagctctcgaactccacgatcaccaaggtgcagagccagccttcctgttcggccttgaactgatcataagtggattggagaagcagctgaagtgtgaaagtgggtct

SEQ ID NO: 1254 - DNA, 624 bp, Artificial Sequence
  synthetic construct; nucleotides encoding sulfonylurea responsive repressor
atgggatctagattagataaaagtaaagtgattaacagcgcattagagctgcttaatgaggtcggaatcgaaggtttaacaacccgtaaactcgcccagaagctaggtgtagagcagcctacattgtattggcatgtaaaaaataagcgagctctgctagacgctatggccattgagatgttggataggcacaagacccactactgtcctttggaaggggaaagctggcaagacttcttgaggaacaaggctaagtccatgagaaatgctttgctcagtcaccgtgatggagccaaggtcgctctaggtacgggcttcacggagcaacagtatgaaactgctgagaactcgcttgccttcctgacacaacaaggtttctcccttgagaacgccctctacgcatttcaagctgttgggatctacactctgggttgcgtcttgctggatcaagagctgcaagtcgctaaggaggagagggaaacacctactactgaaagtatgccgccactggttcgacaagcttacgaactcaaagatcaccaaggtgcagagccagccttcctgttcggccttgaactgatcataagtggattggagaagcagctgaagtgtgaaagtgggtct

SEQ ID NO: 1255 - DNA, 625 bp, Artificial Sequence
  synthetic construct; nucleotides encoding sulfonylurea responsive repressor
atgggatctagattagataaaagtaaagtgattaacagcgcattagagctgcttaatgaggtcggaatcgaaggtttaacaacccgtaaactcgcccagaagctaggtgtagagcagcctacattgtattggcatgtaaaaaataagcgagctctgctagacgctatggccattgagatgttcgataggcacgacacccactactgtcctttggaaggggaaagctggcaagacttcttgaggaacaaggctaagtccatgagaaatgctttgctcagtcaccgtgatggagccaaggtcgctctaggtacgggcttcacggagcaacagtatgaaactgctgagaactgtcttgccttcctgacacaacaaggtttctcccttgagaacgccctctacgcatttcaagctgttgggatctacactctgggttgcgtcttgctggatcaagagctgcaagtcgctaaggaggagagggaaacacctactactgatagtatgccgccactggttcgacaagcttacgaactcagagatcaccaaggtgcagagccagccttcctgttcggccttgaactgatcataagtggattggagaagcagctgaaggcaggaaagtgggtct

SEQ ID NO: 1256 - DNA, 624 bp, Artificial Sequence
  synthetic construct; nucleotides encoding sulfonylurea responsive repressor
atgggatctagattagataaaagtaaagtgattaacagcgcattagagctgcttaatgaggtcggaatcgaaggtttaacaacccgtaaactcgcccagaagctaggtgtagagcagcctacattgtattggcatgtaaaaaataagcgagctctgctagacgctatggccattgagatgttggataggcacaagacccactactgtcctttggaaggggaaagctggcaagacttcttgaggaacagggctaagtccatgagaaatgctttgctcagtcaccgtgatggagccaaggtcgctctaggtacgggcttcacggagcaacagtatgaaactatggagaactcgcttgccttcctgacacaacaaggtttctcccttgagaacgccctctacgcatttcaagctgttgggatctacactctgggttgcgtcttgctggatcaagagctgcaagtcgctaaggaggagagggaaacacctactactgatagtatgccgccactggttcgacaagcttacgaactcaaagatcaccaaggtgcagagccagccttcctgttcggccttgaactgatcataagtggattggagaagcagctgaagtgtgaaagtgggtct

SEQ ID NO: 1257 - DNA, 624 bp, Artificial Sequence
  synthetic construct; nucleotides encoding sulfonylurea responsive repressor
atgggatctagattagataaaagtaaagtgattaacagcgcattagagctgcttaatgaggtcggaatcgaaggtttaacaacccgtaaactcgcccagaagctaggtgtagagcagcctacattgtattggcatgtaaaaaataagcgagctctgctagacgctatggccattgagatgttcgataggcacgacacccactactgtcctttggaaggggaaagctggcaagacttcttgaggaacaaggctaagtccatgagaaatgctttgctcagtcaccgtgatggagccaaggtcgctctaggtacgggcttcacggagcaacagtatgaaactgctgagaactgtcttgccttcctgacacaacaaggtttctcccttgagaacgccctctacgcatttcaagctgttgggatctacactctgggttgcgtcttgctggatcaagagctgcaagtcgctaaggaggagagggaaacacctactactgatagtatgccgccactggttcgacaagctatcgaactccacgatcaccaaggtgcagagccagccttcctgttcggccttgaactgatcataagtggattggagaagcagctgaaggcagaaagtgggtct

SEQ ID NO: 1258 - DNA, 625 bp, Artificial Sequence
  synthetic construct; nucleotides encoding sulfonylurea responsive repressor
  misc_feature (250)..(250): n is a, c, g, or t
  misc_feature (341)..(341): n is a, c, g, or t
  misc_feature (525)..(525): n is a, c, g, or t
  misc_feature (533)..(533): n is a, c, g, or t
  misc_feature (535)..(535): n is a, c, g, or t
  misc_feature (572)..(572): n is a, c, g, or t
  misc_feature (587)..(587): n is a, c, g, or t
  misc_feature (612)..(612): n is a, c, g, or t
atgggatctagattagataaaagtaaagtgattaacagcgcattagagctgcttaatgaggtcggaatcgaaggtttaacaacccgtaaactcgcccagaagctaggtgtagagcagcctacattgtattggcatgtaaaaaataagcgagctctgctagacgctatggccattgagatgttggataggcacaagacccactacctgtcctttggaaggggaaagctggcaagacttcttgaggaacaangctaagtccatgagaaatgctttgctcagtcaccgtgatggagccaaggtcgctctaggtacgggcttcacggagcaacagtatgaaactntggagaactctcttgccttcctgacacaacaaggtttctcccttgagaacgccctctacgcaatgcaagctgttgggatctacactctgggttgcgtcttgctggatcaagagctgcaagtcgctaaggaggagagggaaacacctactactgatagtatgccgccactggttcgacaagcttncgaactcnangatcaccaaggtgcagagccagccttcctgttcggcnttgaactgatcatangtggattggagaagcagctgaaggnagaaagtgggtct

SEQ ID NO: 1259 - DNA, 618 bp, Artificial Sequence
  synthetic construct; nucleotides encoding sulfonylurea responsive repressor
atgggatctagattagataaaagtaaagtgattaacagcgcattagagctgcttaatgaggtcggaatcgaaggtttaacaacccgtaaactcgcccagaagctaggtgtagagcagcctacattgtattggcatgtaaaaaataagcgagctctgctagacgctatggccattgagatgttcgataggcacgacacccactacctgcctttggaaggggaaagctggcaagacttcttgaggaacaaggctaagtccatgagaaatgctttgctcagtcaccgtgatggagctaaggtcgctctaggtacgggcttcacggagcaacagtatgaaactatggagaactcgcttgccttcctgacacaacaaggtttctcccttgagaacgccctctacgcatttcaagctgttgggatctacactctgggttgcgtcttgctggatcaagagctgcaagtcgctaaggaggagagggaaacacctactactgatagtatgccgccactggttcgacaagcttacgaactcaaagatcaccaaggtgcagagccagccttcctgttcggccttgaactgatcatatgtggattgcagctgaagtgtgaaagtgggtct

SEQ ID NO: 1260 - DNA, 624 bp, Artificial Sequence
  synthetic construct; nucleotides encoding sulfonylurea responsive repressor
atgggatctagattagataaaagtaaagtgattaacagcgcattagagctgcttaatgaggtcggaatcgaaggtttaacaacccgtaaactcgcccagaagctaggtgtagagcagcctacattgtattggcatgtaaaaaataagcgagctctgctagacgctatggccattgagatgttggataggcacgacacccactacctgcctttggaaggggaaagctggcaagacttcttgaggaacaatgctaagtccaggagaaatgctttgctcagtcaccgtgatggagccaaggtcgctctaggtacgggcttcacggagcaacagtatgaaactatggagaactcgcttgccttcctgacacaacaaggtttctcccttgagaacgccctctacgcatttcaagctgttgggatctacactctgggttgcgtcttgctggatcaagagctgcaagtcgctaaggaggagagggaaacacctactactgatagtatgccgccactggttcgacaagcttacgaactcaaagatcaccaaggtgcagagccagccttcctgttcggccttgaactgatcatatgtggattggagaagcagctgaagtgtgaaagtgggtct

SEQ ID NO: 1261 - DNA, 624 bp, Artificial Sequence
  synthetic construct; nucleotides encoding sulfonylurea responsive repressor
atgggatctagattagataaaagtaaagtgattaacagcgcattagagctgcttaatgaggtcggaatcgaaggtttaacaacccgtaaactcgcccagaagctaggtgtagagcagcctacattgtattggcatgtaaaaaataagcgagctctgctagacgctatggccattgagatgatggataggcacaagacccactactgtcctttggaaggggaaagctggcaagacttcttgaggaacaaggctaagtccaggagaaatgctttgctcagtcaccgtgatggagccaaggtctgcctaggtacgggcttcacggagcaacagtatgaaactgctgagaactggcttgccttcctgacacaacaaggtttctcccttgagaacgccctctacgcaatgcaagctgttgggatctacactctgggttgcgtcttgctggatcaagagctgcaagtcgctaaggaggagagggaaacacctactactgatagtatgccgccactggttcgacaagcttacgaactcaaagatcaccaaggtgcagagccagccttcctgttcggccttgaactgatcataagtggattggagaagcagctgaagtgtgaaagtgggtct

SEQ ID NO: 1262 - DNA, 624 bp, Artificial Sequence
  synthetic construct; nucleotides encoding sulfonylurea responsive repressor
atgggatctagattagataaaagtaaagtgattaacagcgcattagagctgcttaatgaggtcggaatcgaaggtttaacaacccgtaaactcgcccagaagctaggtgtagagcagcctacattgtattggcatgtaaaaaataagcgagctctgctagacgctatggccattgagatgttggataggcacgacacccactacctgcctttggaaggggaaagctggcaagacttcttgaggaacaatgctaagtccaggagaaatgctttgctcagtcaccgtgatggagccaaggtcgctctaggtacgggcttcacggagcaacagtatgaaactatggagaactcgcttgccttcctgacacaacaaggtttctcccttgagaacgccctctacgcaatgcaagctgttgggatctacactctgggttgcgtcttgctggatcaagagctgcaagtcgctaaggaggagagggaaacacctactactgatagtatgccgccactggttcgacaagcttacgaactcaaagatcaccaaggtgcagagccagccttcctgttcggccttgaactgatcatatgtggattggagaagcagctgaaggcagaaagtgggtct

SEQ ID NO: 1263 - DNA, 624 bp, Artificial Sequence
  synthetic construct; nucleotides encoding sulfonylurea responsive repressor
atgggatctagattagataaaagtaaagtgattaacagcgcattagagctgcttaatgaggtcggaatcgaaggtttaacaacccgtaaactcgcccagaagctaggtgtagagcagcctacattgtattggcatgtaaaaaataagcgagctctgctagacgctatggccattgagatgttggataggcacgccacccactactgtcctttggaaggggaaagctggcaagacttcttgaggaacaaggctaagtccaggagaaatgctttgctcagtcaccgtgatggagccaaggtcgctctaggtacgggcttcacggagcaacagtatgaaactatggagaacagtcttgccttcctgacacaacaaggtttctcccttgagaacgccctctacgcaatgcaagctgttgggatctacactctgggttgcgtcttgctggatcaagagctgcaagtcgctaaggaggagagggaaacacctactactgatagtatgccgccactggttcgacaagcttacgaactcaaagatcaccaaggtgcagagccagccttcctgttcggccttgaactgatcatatgtggattggagaagcagctgaagtgtgaaagtgggtct

SEQ ID NO: 1264 - DNA, 624 bp, Artificial Sequence
  synthetic construct; nucleotides encoding sulfonylurea responsive repressor
atgggatctagattagataaaagtaaagtgattaacagcgcattagagctgcttaatgaggtcggaatcgaaggtttaacaacccgtaaactcgcccagaagctaggtgtagagcagcctacattgtattggcatgtaaaaaataagcgagctctgctagacgctatggccattgagatgttggataggcacgccacccactacctgcctttggaaggggaaagctggcaagacttcttgaggaacaatgctaagtccaggagaaatgctttgctcagtcaccgtgatggagccaaggtctgcctaggtacgggcttcacggagcaacagtatgaaactatggagaactctcttgccttcctgacacaacaaggtttctcccttgagaacgccctctacgcaatgcaagctgttgggatctacactctgggttgcgtcttgctggatcaagagctgcaagtcgctaaggaggagagggaaacacctactactgatagtatgccgccactggttcgacaagcttacgaactcaaagatcaccaaggtgcagagccagccttcctgttcggccttgaactgatcatatgtggattggagaagcagctgaagtgtgaaagtgggtct

SEQ ID NO: 1265 - DNA, 624 bp, Artificial Sequence
  synthetic construct; nucleotides encoding sulfonylurea responsive repressor
atgggatctagattagataaaagtaaagtgattaacagcgcattagagctgcttaatgaggtcggaatcgaaggtttaacaacccgtaaactcgcccagaagctaggtgtagagcagcctacattgtattggcatgtaaaaaataagcgagctctgctagacgctatggccattgagatgttggataggcacgccacccactactgtcctttggaaggggaaagctggcaagacttcttgaggaacaaggctaagtccaggagaaatgctttgctcagtcaccgtgatggagccaaggtcgctctaggtacgggcttcacggagcaacagtatgaaactatggagaactcgcttgccttcctgacacaacaaggtttctccattgagaacgccctctacgcaatgcaagctgttgggatctacactctgggttgcgtcttgctggatcaagagctgcaagtcgctaaggaggagagggaaacacctactactgatagtatgccgccactggttcgacaagcttacgaactcagagatcaccaaggtgcagagccagccttcctgttcggccttgaactgatcatatgtggattggagaagcagctgaagtgtgaaagtgggtct

SEQ ID NO: 1266 - DNA, 624 bp, Artificial Sequence
  synthetic construct; nucleotides encoding sulfonylurea responsive repressor
atgggatctagattagataaaagtaaagtgattaacagcgcattagagctgcttaatgaggtcggaatcgaaggtttaacaacccgtaaactcgcccagaagctaggtgtagagcagcctacattgtattggcatgtaaaaaataagcgagctctgctagacgctatggccattgagatgttggataggcacgccacccactacctgcctttggaaggggaaagctggcaagacttcttgaggaacagggctaagtccatgagaaatgctttgctcagtcaccgtgatggagccaaggtcgctctaggtacgggcttcacggagcaacagtatgaaactatggagaactgtcttgccttcctgacacaacaaggtttctcccttgagaacgccctctacgcatttcaagctgttgggatctacactctgggttgcgtcttgctggatcaagagctgcaagtcgctaaggaggagagggaaacacctactactgatagtatgccgccactggttcgacaagcttacgaactcaaagatcaccaaggtgcagagccagccttcctgttcggccttgaactgatcataagtggattggagaagcagctgaaggcagaaagtgggtct

SEQ ID NO: 1267 - DNA, 621 bp, Artificial Sequence
  synthetic construct; nucleotides encoding sulfonylurea responsive repressor
atgggatctagattagataaaagtaaagtgattaacagcgcattagagctgcttaatgaggtcggaatcgaaggtttaacaacccgtaaactcgcccagaagctaggtgtagagcagcctacattgtattggcatgtaaaaaataagcgagctctgctagacgctatggccattgagatgttggataggcacgacacccactactgtcctttggaaggggaaagctggcaagacttcttgaggaacaaggctaagtccatgagaaatgctttgctcagtcaccgtgatggagccaaggtctgcctaggtacgggcttcacggagcaacagtatgaaactgctgagaactcgcttgccttcctgacacaacaaggtttctcccttgagaacgccctctacgcaggtcaagctgttgggatctacactctgggttgcgtcttgctggatcaagagctgcaagtcgctaaggaggagagggaaacacctactactgatagtatgccgccactggttcgacaagctctcgaactccacgatcaccaaggtgcagagccagccttcctgttcggccttgaactgatcataagtggattggagaagcactgaaggcagaaatgggtt

SEQ ID NO: 1268 - DNA, 624 bp, Artificial Sequence
  synthetic construct; nucleotides encoding sulfonylurea responsive repressor
atgggatctagattagataaaagtaaagtgattaacagcgcattagagctgcttaatgaggtcggaatcgaaggtttaacaacccgtaaactcgcccagaagctaggtgtagagcagcctacattgtattggcatgtaaaaaataagcgagctctgctagacgctatggccattgagatgttggataggcacgccacccactactgtcctttggaaggggaaagctggcaagacttcttgaggaacaaggctaagtccatgagaaatgctttgctcagtcaccgtgatggagccaaggtcgctctaggtacgggcttcacggagcaacagtatgaaactatggagaactctcttgccttcctgacacaacaaggtttctcccttgagaacgccctctacgcatttcaagctgttgggatctacactctgggttgcgtcttgctggatcaagagctgcaagtcgctaaggaggagagggaaacacctactactgatagtatgccgccactggttcgacaagcttacgaactcaaagatcaccaaggtgcagagccagccttcctgttcggccttgaactgatcataagtggattggagaagcagctgaaggcagaaagtgggtct

SEQ ID NO: 1269 - DNA, 624 bp, Artificial Sequence
  synthetic construct; nucleotides encoding sulfonylurea responsive repressor
atgggatctagattagataaaagtaaagtgattaacagcgcattagagctgcttaatgaggtcggaatcgaaggtttaacaacccgtaaactcgcccagaagctaggtgtagagcagcctacattgtattggcatgtaaaaaataagcgagctctgctagacgctatggccattgagatgttcgataggcacaagacccactactgtcctttggaaggggaaagctggcaagacttcttgaggaacaatgctaagtccaggagaaatgctttgctcagtcaccgtgatggagccaaggtcgctctaggtacgggcttcacggagcaacagtatgaaactgctgagaactgtcttgccttcctgacacaacaaggtttctcccttgagaacgccctctacgcaatgcaagctgttgggatctacactctgggttgcgtcttgctggatcaagagctgcaagtcgctaaggaggagagggaaacacctactactgatagtatgccgccactggttcgacaagcttacgaactcaaagatcaccaaggtgcagagccagccttcctgttcggccttgaactgatcatatgtggattggagaagcagctgaaggcagaaagtgggtct

SEQ ID NO: 1270 - DNA, 624 bp, Artificial Sequence
  synthetic construct; nucleotides encoding sulfonylurea responsive repressor
atgggatctagattagataaaagtaaagtgattaacagcgcattagagctgcttaatgaggtcggaatcgaaggtttaacaacccgtaaactcgcccagaagctaggtgtagagcagcctacattgtattggcatgtaaaaaataagcgagctctgctagacgctatggccattgatatgttggataggcacaagacccactactgtcctttggaaggggaaagctggcaagacttcttgaggaacagggctaagtccatgagaaatgctttgctcagtcaccgtgatggagccaaggtcgctctaggtacgggcttcacggagcaacagtatgaaactatggagaactgtcttgccttcctgacacaacaaggtttctcccttgagaacgccctctacgcaatgcaagctgttgggatctacactctgggttgcgtcttgctggatcaagagctgcaagtcgctaaggaggagagggaaacacctactactgatagtatgccgccactggttcgacaagcttacgaactcagagatcaccaaggtgcagagccagccttcctgttcggccttgaactgatcataagtggattggagaagcagctgaaggcagaaagtgggtct

SEQ ID NO: 1271 - DNA, 624 bp, Artificial Sequence
  synthetic construct; nucleotides encoding sulfonylurea responsive repressor
atgggatctagattagataaaagtaaagtgattaacagcgcattagagctgcttaatgaggtcggaatcgaaggtttaacaacccgtaaactcgcccagaagctaggtgtagagcagcctacattgtattggcatgtaaaaaataagcgagctctgctagacgctatggccattgagatgttggataggcacgccacccactacctgcctttggaaggggaaagctggcaagacttcttgaggaacagggctaagtccatgagaaatgctttgctcagtcaccgtgatggagccaaggtcgctctaggtacgggcttcacggagcaacagtatgaaactgctgagaactcgcttgccttcctgacacaacaaggtttctcccttgagaacgccctctacgcatttcaagctgttgggatctacactctgggttgcgtcttgctggatcaagagctgcaagtcgctaaggaggagagggaaacacctactactgatagtatgccaccactggttcgacaagctctcgaactccacgatcaccaaggtgcagagccagccttcctgttcggccttgaactgatcatatgtggattggagaagcagctgaaggcagaaagtgggtct

SEQ ID NO: 1272 - DNA, 624 bp, Artificial Sequence
  synthetic construct; nucleotides encoding sulfonylurea responsive repressor
atgggatctagattagataaaagtaaagtgattaacagcgcattagagctgcttaatgaggtcggaatcgaaggtttaacaacccgtaaactcgcccagaagctaggtgtagagcagcctacattgtattggcatgtaaaaaataagcgagctctgctagacgctatggccattgagatgttcgataggcacgacacccactactgtcctttggaaggggaaagctggcaagacttcttgaggaacaaggctaagtccatgagaaatgctttgctcagtcaccgtgatggagccaaggtcgctctaggtacgggcttcacggagcaacagtatgaaactgctgagaactgtcttgccttcctgacacaacaaggtttctcccttgagaacgccctctacgcatttcaagctgttgggatctacactctgggttgcgtcttgctggatcaagagctgcaagtcgctaaggaggagagggaaacacctactactgatagtatgccgccactggttcgacaagctctcgaactccacgatcaccaaggtgcagagccagccttcctgttcggccttgaactgatcatatgtggattggagaagcagctgaagtgtgaaagtgggtct

SEQ ID NO: 1273 - DNA, 624 bp, Artificial Sequence
  synthetic construct; nucleotides encoding sulfonylurea responsive repressor
atgggatctagattagataaaagtaaagtgattaacagcgcattagagctgcttaatgaggtcggaatcgaaggtttaacaacccgtaaactcgcccagaagctaggtgtagagcagcctacattgtattggcatgtaaaaaataagcgagctctgctagacgctatggccattgagatgttggataggcacaagacccactactgtcctttggaaggggaaagctggcaagacttcttgaggaacaaggctaagtccatgagaaatgctttgctcagtcaccgtgatggagccaaggtcgctctaggtacgggcttcacggagcaacagtatgaaactatggagaactcgcttgccttcctgacacaacaaggtttctcccttgagaacgccctctacgcaatgcaagctgttgggatctacactctgggttgcgtcttgctggatcaagagctgcaagtcgctaaggaggagagggaaacacctactactgatagtatgccgccactggttcgacaagcttacgaactcaaagatcaccaaggtgcagagccagccttcctgttcggccttgaactgatcataagtggattggagaagcagctgaagtgtgaaagtgggtct

SEQ ID NO: 1274 - DNA, 624 bp, Artificial Sequence
  synthetic construct; nucleotides encoding sulfonylurea responsive repressor
atgggatctagattagataaaagtaaagtgattaacagcgcattagagctgcttaatgaggtcggaatcgaaggtttaacaacccgtaaactcgcccagaagctaggtgtagagcagcctacattgtattggcatgtaaaaaataagcgagctctgctagacgctatggccatagagatgttggataggcacgccacccactactgtcctttggaaggggaaagctggcaagacttcttgaggaacagggctaagtccatgagaaatgctttgctcagtcaccgtgatggagccaaggtcgctctaggtacgggcttcacggagcaacagtatgaaactatggagaactctcttgccttcctgacacaacaaggtttctcccttgagaacgccctctacgcatttcaagctgttgggatctacactctgggttgcgtcttgctggatcaagagctgcaagtcgctaaggaggagagggaaacacctactactgatagtatgccgccactggttcgacaagcttacgaactcaaagatcaccaaggtgcagagccagccttcctgttcggccttgaactgatcatatgtggattggagaagcagctgaagtgtgaaagtgggtct

SEQ ID NO: 1275 - DNA, 624 bp, Artificial Sequence
  synthetic construct; nucleotides encoding sulfonylurea responsive repressor
atgggatctagattagataaaagtaaagtgattaacagcgcattagagctgcttaatgaggtcggaatcgaaggtttaacaacccgtaaactcgcccagaagctaggtgtagagcagcctacattgtattggcatgtaaaaaataagcgagctctgctagacgctatggccattgagatgttcgataggcacaagacccactacctgcctttggaaggggaaagctggcaagacttcttgaggaacagggctaagtccatgagaaatgctttgctcagtcaccgtgatggagccaaggtcgctctaggtacgggcttcacggagcaacagtatgaaactgctgagaactcgcttgccttcctgacacaacaaggtttctcccttgagaacgccctctacgcatttcaagctgttgggatctacactctgggttgcgtcttgctggatcaagagctgcaagtcgctaaggaggagagggaaacacctactactgatagtatgccgccactggttcgacaagctatcgaactccacgatcaccaaggtgcagagccagccttcctgttcggcctggaactgatcataagtggattggagaagcagctgaagtgtgaaagtgggtct

SEQ ID NO: 1276 - DNA, 624 bp, Artificial Sequence
  synthetic construct; nucleotides encoding sulfonylurea responsive repressor
atgggatctagattagataaaagtaaagtgattaacagcgcattagagctgcttaatgaggtcggaatcgaaggtttaacaacccgtaaactcgcccagaagctaggtgtagagcagcctacattgtattggcatgtaaaaaataagcgagctctgctagacgctatggccattgagatgttcgataggcacgccatccactactgtcctttggaaggggaaagctggcaagacttcttgaggaacaatgctaagtccaggagaaatgctttgctccgtcaccgtgatggagccaaggtcgctctaggtacgggcttcacggagcaacagtatgaaactgctgagaactcgcttgccttcctgacacaacaaggtttctcccttgagaacgccctctacgcatttcaagctgttgggatctacactctgggttgcgtcttgctggatcaagagctgcaagtcgctaaggaggagagggaaacacctactactgatagtatgccgccactggttcgacaagcttacgaactcagagatcaccaaggtgcagagccagccttcctgttcggccttgaactgatcatatgtggattggagaagcagctgaagtgtgaaagtgggtct

SEQ ID NO: 1277 - DNA, 624 bp, Artificial Sequence
  synthetic construct; nucleotides encoding sulfonylurea responsive repressor
atgggatctagattagataaaagtaaagtgattaacagcgcattagagctgcttaatgaggtcggaatcgaaggtttaacaacccgtaaactcgcccagaagctaggtgtagagcagcctacattgtattggcatgtaaaaaataagcgagctctgctagacgctatggccattgagatgttggataggcacaagacccactactgtcctttggaaggggaaagctggcaagacttcttgaggaacaaggctaagtccatgagaaatgctttgctcagtcaccgtgatggagccaaggtctgcctaggtacgggcttcacggagcaacagtatgaaactatggagaactcgcttgccttcctgacacaacaaggtttctcccttgagaacgccctctacgcaatgcaagctgttgggatctacactctgggttgcgtcttgctggatcaagagctgcaagtcgctaaggaggagagggaaacacctactactgatagtatgccgccactggttcgacaagcttacgaactcaaagatcaccaaggtgcagagccagccttcctgttcggccttgaactgatcatatgtggattggagaagcagctgaaggcagaaagtgggtct

SEQ ID NO: 1278 - DNA, 624 bp, Artificial Sequence
  synthetic construct; nucleotides encoding sulfonylurea responsive repressor
atgggatctagattagataaaagtaaagtgattaacagcgcattagagctgcttaatgaggtcggaatcgaaggtttaacaacccgtaaactcgcccagaagctaggtgtagagcagcctacattgtattggcatgtaaaaaataagcgagctctgctagacgctatggccattgagatgttcgataggcacgacacccactacctgcctttggaagggaaaagctggcaagacttcttgaggaacagggctaagtccatgagaaatgctttgctcagtcaccgtgatggagccaaggtcgctctaggtacgggcttcacggagcaacagtatgaaactgctgagaactctcttgccttcctgacacaacaaggtttctcccttgagaacgccctctacgcatttcaagctgttgggatctacactctgggttgcgtcttgctggatcaagagctgcaagtcgctaaggaggagagggaaacacctactactgatagtatgccgccactggttcgacaagcttacgaactccacgatcaccaaggtgcagagccagccttcctgttcggccttgaactgatcataagtggattggagaagcagctgaagtgtgaaagtgggtct

SEQ ID NO: 1279 - DNA, 621 bp, Artificial Sequence
  synthetic construct; nucleotides encoding sulfonylurea responsive repressor
atggccagactcgacaagagcaaggtgatcaacagcgcactggagctgctgaacgaggtcggaatcgaaggcctcacaacccgtaagctcgcccagaagctcggggttgagcagcctacattgtactggcacgtcaagaacaagcgagctctgctagacgctatggccattgagatgttggataggcacaagacccactactgtcctttggaaggggaaagctggcaagacttcttgaggaacaaggctaagtccatgagaaatgctttgctcagtcaccgtgatggagccaaggtcgctctaggtacgggcttcacggagcaacagtatgaaactgctgagaactctcttgccttcctgacacaacaaggtttctcccttgagaacgccctctacgcaggtcaagctgttgggatctacactctgggttgcgtcttgctggatcaagagctgcaagtcgctaaggaggagagggaaacacctactactgatagtatgccgccactggttcgacaagcttacgaactcagagatcaccaaggtgcagagccagccttcctgttcggccttgaactgatcataagtggattggagaagcagctgaaggcagaaagtgggtct

SEQ ID NO: 1280 - DNA, 621 bp, Artificial Sequence
  synthetic construct; nucleotides encoding sulfonylurea responsive repressor
atggccagactcgacaagagcaaggtgatcaacagcgcactggagctgctgaacgaggtcggaatcgaaggcctcacaacccgtaagctcgcccagaagctcggggttgagcagcctacattgtactggcacgtcaagaacaagcgagctctgctagacgctatggccattgagatgttcgataggcacgccacccactacctgcctttggaaggggaaagctggcaagacttcttgaggaacaaggctaagtccatgagaaatgctttgctcagtcaccgtgatggagccaaggtcgctctaggtacgggcttcacggagcaacagtatgaaactatggagaactcgcttgccttcctgacacaacaaggtttctcccttgagaacgccctctacgcaatgcaagctgttgggatctacactctgggttgcgtcttgctggatcaagagctgcaagtcgctaaggaggagagggaaacacctactactgatagtatgccgccactggttcgacaagctatcgaactccacgatcaccaaggtgcagagccagccttcctgttcggccttgaactgatcataagtggattggagaagcagctgaaggcagaaagtgggtct

SEQ ID NO: 1281 - DNA, 621 bp, Artificial Sequence
  synthetic construct; nucleotides encoding sulfonylurea responsive repressor
atggccagactcgacaagagcaaggtgatcaacagcgcactggagctgctgaacgaggtcggaatcgaaggcctcacaacccgtaagctcgcccagaagctcggggttgagcagcctacattgtactggcacgtcaagaacaagcgagctctgctagacgctatggccattgagatgttcgataggcacgccacccactacctgcctttggaaggggaaagctggcaagacttcttgaggaacaaggccaagtccatgagaaatgctttgctcagtcaccgtgatggagccaaggtcgctctaggtacgggcttcacggagcaacagtatgaaactatggagaactgtcttgccttcctgacacaacaaggtttctcccttgagaacgccctctacgcaatgcaagctgttgggatctacactctgggttgcgtcttgctggatcaagagctgcaagtcgctaaggaggagagggaaacacctactactgatagtatgccgccactggttcgacaagcttacgaactcaaagatcaccaaggtgcagagccagccttcctgttcggccttgaactgatcatatgtggattggagaagcagctgaaggcagaaagtgggtct

SEQ ID NO: 1282 - DNA, 621 bp, Artificial Sequence
  synthetic construct; nucleotides encoding sulfonylurea responsive repressor
atggccagactcgacaagagcaaggtgatcaacagcgcactggagctgctgaacgaggtcggaatcgaaggcctcacaacccgtaagctcgcccagaagctcggggttgagcagcctacattgtactggcacgtcaagaacaagcgagctctgctagacgctatggccattgagatgttggataggcacaagacccactactgtcctttggaaggggaaagctggcaagacttcttgaggaacaaggctaagtccatgagaaatgctttgctcagtcaccgtgatggagccaaggtcgctctaggtacgggcttcacggagcaacagtatgaaactatggagaactgtcttgccttcctgacacaacaaggtttctcccttgagaacgccctctacgcaatgcaagctgttgggatctacactctgggttgcgtcttgctggatcaagagctgcaagtcgctaaggaggagagggaaacacctactactgatagtatgccgccactggttcgacaagcttacgaactcagagatcaccaaggtgcagagccagccttcctgttcggccttgaactgatcatatgtggattggagaagcagctgaagtgtgaaagtgggtct

SEQ ID NO: 1283 - DNA, 621 bp, Artificial Sequence
  synthetic construct; nucleotides encoding sulfonylurea responsive repressor
atggccagactcgacaagagcaaggtgatcaacagcgcactggagctgctgaacgaggtcggaatcgaaggcctcacaacccgtaagctcgcccagaagctcggggttgagcagcctacattgtactggcacgtcaagaacaagcgagctctgcttgacgctatggccattgagatgttggataggcacgccacccactacctgcctttggaaggggaaagctggcaagacttcttgaggaacaaggctaagtccatgagaaatgctttgctcagtcaccgtgatggagccaaggtcgctctaggtacgggcttcacggagcaacagtatgaaactgctgagaactctcttgccttcctgacacaacaaggtttctcccttgagaacgccctctacgcatttcaagctgttgggatctacactctgggttgcgtcttgctggatcaagagctgcaagtcgctaaggaggagagggaaacacctactactgatagtatgccgccactggttcgacaagctatcgaactcagagatcaccaaggtgcagagccagccttcctgttcggccttgaactgatcataagtggattggagaagcagctgaagtgtgaaagtgggtct

SEQ ID NO: 1284 - DNA, 621 bp, Artificial Sequence
  synthetic construct; nucleotides encoding sulfonylurea responsive repressor
atggccagactcgacaagagcaaggtgatcaacagcgcactggagctgctgaacgaggtcggaatcgaaggcctcacaacccgtaagctcgcccagaagctcggggttgagcagcctacattgtactggcacgtcaagaacaagcgagctctgctagacgctatggccattgagatgttcgataggcacgccacccactactgtcctttggaaggggaaagctggcaagacttcttgaggaacaaggctaagtccatgagaaatgctttgctcagacaccgtgatggagccaaggtcgctctaggtacgggcttcacggagcaacagtatgaaactgctgagaactgtcttgccttcctgacacaacaaggtttctcccttgagaacgccctctacgcatttcaagctgttgggatctacactctgggttgcgtcttgctggatcaagagctgcaagtcgctaaggaggagagggaaacacctactactgatagtatgccgccactggttcgacaagctatcgaactcaaagatcaccaaggtgcagagccagccttcctgttcggccttgaactgatcatatgtggattggagaagcagctgaagtgtgaaagtgggtct

SEQ ID NO: 1285 - DNA, 621 bp, Artificial Sequence
  synthetic construct; nucleotides encoding sulfonylurea responsive repressor
atggccagactcgacaagagcaaggtgatcaacagcgcactggagctgctgaacgaggtcggaatcgaaggcctcacaacccgtaagctcgcccagaagctcggggttgagcagcctacattgtactggcacgtcaagaacaagcgagctctgctagacgctatggccattgagatgttcgataggcacaagacccactacctgcctttggaaggggaaagctggcaagacttcttgaggaacagggctaagtccatgagaaatgctttgctcagtcaccgtgatggagccaaggtcgctctaggtacgggcttcacggagcaacagtatgaaactatggagaactcgcttgccttcctgacacaacaaggtttctcccttgagaacgccctctacgcaatgcaagctgttgggatctacactctgggttgcgtcttgctggatcaagagctgcaagtcgctaaggaggagagggaaacacctactactgatagtatgccgccactggttcgacaagctatcgaactcaaagatcaccaaggtgcagagccagccttcctgttcggccttgaactgatcataagtggattggagaagcagctgaaggcagaaagtgggtct

SEQ ID NO: 1286 - DNA, 621 bp, Artificial Sequence
  synthetic construct; nucleotides encoding sulfonylurea responsive repressor
atggccagactcgacaagagcaaggtgatcaacagcgcactggagctgctgaacgaggtcggaatcgaaggcctcacaacccgtaagctcgcccagaagctcggggttgagcagcctacattgtactggcacgtcaagaacaagcgagctctgctagacgctatggccattgagatgttcgataggcacgacacccactacctgcctttggaaggggaaagctggcaagacttcttgaggaacaaggctaagtccatgagaaatgctttgctcagtcaccgtgatggagccaaggtcgctctaggtacgggcttcacggagcaacagtatgaaactgctgagaactgtcttgccttcctgacacaacaaggtttctcccttgagaacgccctctacgcatttcaagctgttgggatctacactctgggttgcgtcttgctggatcaagagctgcaagtcgctaaggaggagagggaaacacctactactgatagtatgccgccactggttcgacaagcttacgaactcagagatcaccaaggtgcagagccagccttcctgttcggccttgaactgatcatatgtggattggagaagcagctgaagtgtgaaagtgggtct

SEQ ID NO: 1287 - DNA, 621 bp, Artificial Sequence
  synthetic construct; nucleotides encoding sulfonylurea responsive repressor
atggccagactcgacaagagcaaggtgatcaacagcgcactggagctgctgaacgaggtcggaatcgaaggcctcacaacccgtaagctcgcccagaagctcggggttgagcagcctacattgtactggcacgtcaagaacaagcgagctctgctagacgctatggccattgagatgttcgataggcacgccacccactactgtcctttggaaggggaaagctggcaagacttcttgaggaacagggctaagtccatgagaaatgctttgctcagtcaccgtgatggagccaaggtctgcctaggtacgggcttcacggagcaacagtatgaaactatggagaactctcttgccttcctgacacaacaaggtttctcccttgagaacgccctctacgcaatgcaagctgttgggatctacactctgggttgcgtcttgctggatcaagagctgcaagtcgctaaggaggagagggaaacacctactactgatagtatgccgccactggttcgacaagctttcgaactcaaagatcaccaaggtgcagagccagccttcctgttcggccttgaactgatcatatgtggattggagaagcagctgaagtgtgaaagtgggtct

SEQ ID NO: 1288 - DNA, 621 bp, Artificial Sequence
  synthetic construct; nucleotides encoding sulfonylurea responsive repressor
atggccagactcgacaagagcaaggtgatcaacagcgcactggagctgctgaacgaggtcggaatcgaaggcctcacaacccgtaagctcgcccagaagctcggggttgagcagcctacattgtactggcacgtcaagaacaagcgagctctgctagacgctatggccattgagatgttggataggcacgccacccactacctgcctttggaaggggaaagctggcaagacttcttgaggaacaaggctaagtccatgagaaatgctttgctcagtcaccgtgatggagccaaggtcgctctaggtacgggcttcacggagcaacagtatgaaactatggagaactcgcttgccttcctgacacaacaaggtttctcccttgagaacgccctctacgcaatgcaagctgttgggatctacactctgggttgcgtcttgctggatcaagagctgcaagtcgctaaggaggagagggaaacacctactactgatagtatgccgccactggttcgacaagcttacgaactcagagatcaccaaggtgcagagccagccttcctgttcggccttgaactgatcataagtggattggagaagcagctgaagtgtgaaagtgggtct

SEQ ID NO: 1289 - DNA, 621 bp, Artificial Sequence
  synthetic construct; nucleotides encoding sulfonylurea responsive repressor
atggccagactcgacaagagcaaggtgatcaacagcgcactggagctgctgaacgaggtcggaatcgaaggcctcacaacccgtaagctcgcccagaagctcggggttgagcagcctacattgtactggcacgtcaagaacaagcgagctctgctagacgctatggccattgagatgttcgataggcacgccacccactactgtcctttggaaggggaaagctggcaagacttcttgaggaacaaggctaagtccatgagaaatgctttgctcagtcaccgtgatggagccaaggtcgctctaggtacgggcttcacggagcaacagtatgaaactgctgagaactgtcttgccttcctgacacaacaaggtttctcccttgagaacgccctctacgcatttcaagctgttgggatctacactctgggttgcgtcttgctggatcaagagctgcaagtcgctaaggaggagagggaaacacctactactgatagtatgccgccactggttcgacaagcttacgaactcaaagatcaccaaggtgcagagccagccttcctgttcggccttgaactgatcatatgtggattggagaagcagctgaagtgtgaaagtggatct

SEQ ID NO: 1290 - DNA, 621 bp, Artificial Sequence
  synthetic construct; nucleotides encoding sulfonylurea responsive repressor
atggccagactcgacaagagcaaggtgatcaacagcgcactggagctgctgaacgaggtcggaatcgaaggcctcacaacccgtaagctcgcccagaagctcggggttgagcagcctacattgtactggcacgtcaagaacaagcgagctctgctagacgctatggccattgagatgttggataggcacaagacccactacctgcctttggaaggggaaagctggcaagacttcttgaggaacaatgctaagtccatgagaaatgctttgctcagtcaccgtgatggagccaaggtctgcctaggtacgggcttcacggagcaacagtatgaaactgctgagaactggcttgccttcctgacacaacaaggtttctcccttgagaacgccctctacgcatttcaagctgttgggatctacactctgggttgcgtcttgctggatcaagagctgcaagtcgctaaggaggagagggaaacacctactactgatagtatgccgccactggttcgacaagctctcgaactccacgatcaccaaggtgcagagccagccttcctgttcggccttgaactgatcataagtggattggagaagcagctgaaggcagaaagtgggtct

SEQ ID NO: 1291 - DNA, 621 bp, Artificial Sequence
  synthetic construct; nucleotides encoding sulfonylurea responsive repressor
atggccagactcgacaagagcaaggtgatcaacagcgcactggagctgctgaacgaggtcggaatcgaaggcctcacaacccgtaagctcgcccagaagctcggggttgagcagcctacattgtactggcacgtcaagaacaagcgagctctgctagacgctatggccattgagatgttcgataggcacaagacccactactgtcctttggaaggggaaagctggcaagacttcttgaggaacagggctaagtccatgagaaatgctttgctcagtcaccgtgatggagccaaggtcgctctaggtacgggcttcacggagcaacagtatgaaactgctgagaactgtcttgccttcctgacacaacaaggtttctcccttgagaacgccctctacgcatttcaagctgttgggatctacactctgggttgcgtcttgctggatcaagagctgcaagtcgctaaggaggagagggaaacacctactactgatagtatgccgccactggttcgacaagctatcgaactccacgatcaccaaggtgcagagccagccttcctgttcggccttgaactgatcatatgtggattggagaagcagctgaagtgtgaaagtgggtct

SEQ ID NO: 1292 - DNA, 621 bp, Artificial Sequence
  synthetic construct; nucleotides encoding sulfonylurea responsive repressor
atggccagactcgacaagagcaaggtgatcaacagcgcactggagctgctgaacgaggtcggaatcgaaggcctcacaacccgtaagctcgcccagaagctcggggttgagcagcctacattgtactggcacgtcaagaacaagcgagctctgctagacgctatggccattgagatgttcgataggcacgccacccactacctgcctttggaaggggaaagctggcaagacttcttgaggaacaatgctaagtccaggagaaatgctttgctcagtcaccgtgatggagccaaggtcgctctaggtacgggcttcacggagcaacagtatgaaactatggagaactctcttgccttcctgacacaacaaggtttctcccttgagaacgccctctacgcaatgcaagctgttgggatctacactctgggttgcgtcttgctggatcaagagctgcaagtcgctaaggaggagagggaaacacctactactgatagtatgccgccactggttcgacaagcttacgaactcagagatcaccaaggtgcagagccagccttcctgttcggccttgaactgatcatatgtggattggagaagcagctgaaggcagaaagtgggtct

SEQ ID NO: 1293 - DNA, 621 bp, Artificial Sequence
  synthetic construct; nucleotides encoding sulfonylurea responsive repressor
atggccagactcgacaagagcaaggtgatcaacagcgcactggagctgctgaacgaggtcggaatcgaaggcctcacaacccgtaagctcgcccagaagctcggggttgagcagcctacattgtactggcacgtcaagaacaagcgagctctgctagacgctatggccattgagatgttggataggcacaagacccactactgtcctttggaaggggaaagctggcaagacttcttgaggaacaaggctaagtccatgagaaatgctttgctcagtcaccgtgatggagccaaggtcgctctaggtacgggcttcacggagcaacagtatgaaactatggagaactcgcttgccttcctgacacaacaaggtttctcccttgagaacgccctctacgcatttcaagctgttgggatctacactctgggttgcgtcttgctggatcaagagctgcaagtcgctaaggaggagagggaaacacctactactgatagtatgccgccactggttcgacaagcttacgaactcagagatcaccaaggtgcagagccagccttcctgttcggccttgaactgatcataagtggattggagaagcagctgaaggcagaaagtgggtct

SEQ ID NO: 1294 - DNA, 621 bp, Artificial Sequence
  synthetic construct; nucleotides encoding sulfonylurea responsive repressor
atggccagactcgacaagagcaaggtgatcaacagcgcactggagctgctgaacgaggtcggaatcgaaggcctcacaacccgtaagctcgcccagaagctcggggttgagcagcctacattgtactggcacgtcaagaacaagcgagctctgctagacgctatggccattgagatgttggataggcacgccacccactactgtcctttggaaggggaaagctggcaagacttcttgaggaacaatgctaagtccatgagaaatgctttgctcagtcaccgtgatggagccaaggtcgctctaggtacgggcttcacggagcaacagtatgaaactatggagaactcgcttgccttcctgacacaacaaggtttctcccttgagaacgccctctacgcaatgcaagctgttgggatctacactctgggttgcgtcttgctggatcaagagctgcaagtcgctaaggaggagagggaaacacctactactgatagtatgccgccactggttcgacaagcttacgaactcagagatcaccaaggtgcagagccagccttcctgttcggccttgaactgatcataagtggattggagaagcagctgaagtgtgaaagtgggtct

SEQ ID NO: 1295 - DNA, 621 bp, Artificial Sequence
  synthetic construct; nucleotides encoding sulfonylurea responsive repressor
atggccagactcgacaagagcaaggtgatcaacagcgcactggagctgctgaacgaggtcggaatcgaaggcctcacaacccgtaagctcgcccagaagctcggggttgagcagcctacattgtactggcacgtcaagaacaagcgagctctgctagacgctatggccattgagatgttcgataggcacaagacccactactgtcctttggaaggggaaagctggcaagacttcttgaggaacagggctaagtccatgagaaatgctttgctcagtcaccgtgatggagccaaggtcgctctaggtacgggcttcacggagcaacagtatgaaactatggagaactgtcttgccttcctgacacaacaaggtttctcccttgagaacgccctctacgcaatgcaagctgttgggatctacactctgggttgcgtcttgctggatcaagagctgcaagtcgctaaggaggagagggaaacacctactactgatagtatgccgccactggttcgacaagcttacgaactcagagatcaccaaggtgcagagccagccttcctgttcggccttgaactgatcatatgtggattggagaagcagctgaagtgtgaaagtgggtct

SEQ ID NO: 1296 - DNA, 621 bp, Artificial Sequence
  synthetic construct; nucleotides encoding sulfonylurea responsive repressor
atggccagactcgacaagagcaaggtgatcaacagcgcactggagctgctgaacgaggtcggaatcgaaggcctcacaacccgtaagctcgcccagaagctcggggttgagcagcctacattgtactggcacgtcaagaacaagcgagctctgctagacgctatggccattgagatgttggataggcacgacacccactactgtcctttggaaggggaaagctggcaagacttcttgaggaacaaggctaagtccatgagaaatgctttgctcagtcaccgtgatggagccaaggtcgctctaggtacgggcttcacggagcaacagtatgaaactatggagaactgtcttgccttcctgacacaacaaggtttctcccttgagaacgccctctacgcaatgcaagctgttgggatctacactctgggttgcgtcttgctggatcaagagctgcaagtcgctaaggaggagagggaaacacctactactgatagtatgccgccactggttcgacaagcttacgaactcagagatcaccaaggtgcagagccagccttcctgttcggccttgaactgatcataagtggattggagaagcagctgaaggcagaaagtgggtct

SEQ ID NO: 1297 - DNA, 621 bp, Artificial Sequence
  synthetic construct; nucleotides encoding sulfonylurea responsive repressor
atggccagactcgacaagagcaaggtgatcaacagcgcactggagctgctgaacgaggtcggaatcgaaggcctcacaacccgtaagctcgcccagaagctcggggttgagcagcctacattgtactggcacgtcaagaacaagcgagctctgctagacgctatggccattgagatgttggataggcacgacacccactacctgcctttggaaggggaaagctggcaagacttcttgaggaacaaggctaagtccatgagaaatgctttgctcagtcaccgtgatggagccaaggtcgctctaggtacgggcttcacggagcaacagtatgaaactatggagaactgtcttgccttcctgacacaacaaggtttctcccttgagaacgccctctacgcatttcaagctgttgggatctacactctgggttgcgtcttgctggatcaagagctgcaagtcgctaaggaggagagggaaacacctactactgatagtatgccgccactggttcgacaagcttacgaactcagagatcaccaaggtgcagagccagccttcctgttcggccttgaactgatcataagtggattggagaagcagctgaagtgtgaaagtgggtct

SEQ ID NO: 1298 - DNA, 621 bp, Artificial Sequence
  synthetic construct; nucleotides encoding sulfonylurea responsive repressor
atggccagactcgacaagagcaaggtgatcaacagcgcactggagctgctgaacgaggtcggaatcgaaggcctcacaacccgtaagctcgcccagaagctcggggttgagcagcctacattgtactggcacgtcaagaacaagcgagctctgctagacgctatggccattgagatgttcgataggcacaagacccactacctgcctttggaaggggaaagctggcaagacttcttgaggaacagggctaagtccatgagaaatgctttgctcagtcaccgtgatggagccaaggtcgctctaggtacgggcttcacggagcaacagtatgaaactgctgagaactcgcttgccttcctgacacaacaaggtttctcccttgagaacgccctctacgcatttcaagctgttgggatctacactctgggttgcgtcttgctggatcaagagctgcaagtcgctaaggaggagagggaaacacctactactgatagtatgccgccactggttcgacaagcttacgaactcaaagatcacaaaggtgcagagccagccttcctgttcggccttgaactgatcatatgtggattggagaagcagctgaaggcagaaagtgggtct

SEQ ID NO: 1299 - DNA, 621 bp, Artificial Sequence
  synthetic construct; nucleotides encoding sulfonylurea responsive repressor
atggccagactcgacaagagcaaggtgatcaacagcgcactggagctgctgaacgaggtcggaatcgaaggcctcacaacccgtaagctcgcccagaagctcggggttgagcagcctacattgtactggcacgtcaagaacaagcgagctctgctagacgctatggccattgagatgttggataggcacgccacccactactgtcctttggaaggggaaagctggcaagacttcttgaggaacaaggctaagtccatgagaaatgctttgctcagtcaccgtgatggagccaaggtcgctctaggtacgggcttcacggagcaacagtatgaaactgctgagaactgtcttgccttcctgacacaacaaggtttctcccttgagaacgccctctacgcatttcaagctgttgggatctacactctgggttgcgtcttgctggatcaagagctgcaagtcgctaaggaggagagggaaacacctactactgatagtatgccgccactggttcgacaagcttacgaactcagagatcaccaaggtgcagagccagccttcctgttcggccttgaactgatcatatgtggattggagaagcagctgaaggcagaaagtgggtct

SEQ ID NO: 1300 - DNA, 621 bp, Artificial Sequence
  synthetic construct; nucleotides encoding sulfonylurea responsive repressor
atggccagactcgacaagagcaaggtgatcaacagcgcactggagctgctgaacgaggtcggaatcgaaggcctcacaacccgtaagctcgcccagaagctcggggttgagcagcctacattgtactggcacgtcaagaacaagcgagctctgctagacgctatggccattgagatgttcgataggcacgccacccactactgtcctttggaaggggaaagctggcaagacttcttgaggaacaaggctaagtccatgagaaatgctttgctcagtcaccgtgatggagccaaggtcgctctaggtacgggcttcacggagcaacagtatgaaactgctgagaactctcttgccttcctgacacaacaaggtttctcccttgagaacgccctctacgcaggtcaagctgttgggatctacactctgggttgcgtcttgctggatcaagagctgcaagtcgctaaggaggagagggaaacacctactactgatagtatgccgccactggttcgacaagcttacgaactcaaagatcaccaaggtgcagagccagccttcctgttcggccttgaactgatcatatgtggattggagaagcagctgaagtgtgaaagtgggtct

SEQ ID NO: 1301 - DNA, 621 bp, Artificial Sequence
  synthetic construct; nucleotides encoding sulfonylurea responsive repressor
atggccagactcgacaagagcaaggtgatcaacagcgcactggagctgctgaacgaggtcggaatcgaaggcctcacaacccgtaagctcgcccagaagctcggggttgagcagcctacattgtactggcacgtcaagaacaagcgagctctgctagacgctatggccattgagatgttcgataggcacgacacccactacctgcctttggaaggggaaagctggcaagacttcttgaggaacaaggctaagtccatgagaaatgctttgctcagtcaccgtgatggagccaaggtcgctctaggtacgggcttcacggagcaacagtatgaaactatggagaactcgcttgccttcctgacacaacaaggtttctcccttgagaacgccctctacgcaatgcaagctgttgggatctacactctgggttgcgtcttgctggatcaagagctgcaagtcgctaaggaggagagggaaacacctactactgatagtatgccgccactggttcgacaagcttacgaactcagagatcaccaaggtgcagagccagccttcctgttcggccttgaactgatcataagtggattggagaagcagctgaaggcagaaagtgggtct

SEQ ID NO: 1302 - DNA, 621 bp, Artificial Sequence
  synthetic construct; nucleotides encoding sulfonylurea responsive repressor
atggccagactcgacaagagcaaggtgatcaacagcgcactggagctgctgaacgaggtcggaatcgaaggcctcacaacccgtaagctcgcccagaagctcggggttgagcagcctacattgtactggcacgtcaagaacaagcgagctctgctagacgctatggccattgagatgttcgataggcacaagacccactactgtcctttggaaggggaaagctggcaagacttcttgaggaacagggctaaggccaggagaaatgctttgctcagtcaccgtgatggagccaaggtcgctctaggtacgggcttcacggagcaacagtatgaaactgctgagaactggcttgccttcctgacacaacaaggtttctcccttgagaacgccctctacgcaatgcaagctgttgggatctacactctgggttgcgtcttgctggatcaagagctgcaagtcgctaaggaggagagggaaacacctactactgatagtatgccgccactggttcgacaagcttacgaactcagagatcaccaaggtgcagagccagccttcctgttcggccttgaactgatcataagtggattggagaagcagctgaagtgtgaaagtgggtct

SEQ ID NO: 1303 - DNA, 621 bp, Artificial Sequence
  synthetic construct; nucleotides encoding sulfonylurea responsive repressor
atggccagactcgacaagagcaaggtgatcaacagcgcactggagctgctgaacgaggtcggaatcgaaggcctcacaacccgtaagctcgcccagaagctcggggttgagcagcctacattgtactggcacgtcaagaacaagcgagctctgctagacgctatggccattgagatgttggataggcacgccacccactactgtcctttggaaggggaaagctggcaagacttcttgaggaacagggctaagtccatgagaaatgctttgctcagtcaccgtgatggagccaaggtcgctctaggtacgggcttcacggagcaacagtatgaaactatggagaactgtcttgccttcctgacacaacaaggtttctcccttgagaacgccctctacgcaatgcaagctgttgggatctacactctgggttgcgtcttgctggatcaagagctgcaagtcgctaaggaggagagggaaacacctactactgatagtatgccgccactggttcgacaagcttacgaactcagagatcaccaaggtgcagagccagccttcctgttcggccttgaactgatcatatgtggattggagaagcagctgaagtgtgaaagtgggtct

SEQ ID NO: 1304 - DNA, 621 bp, Artificial Sequence
  synthetic construct; nucleotides encoding sulfonylurea responsive repressor
atggccagactcgacaagagcaaggtgatcaacagcgcactggagctgctgaacgaggtcggaatcgaaggcctcacaacccgtaagctcgcccagaagctcggggttgagcagcctacattgtactggcacgtcaagaacaagcgagctctgctagacgctatggccattgagatgttcgataggcacgccacccactacctgcctttggaaggggaaagctggcaagacttcttgaggaacagggctaagtccatgagaaatgctttgctcagtcaccgtgatggagccaaggtcgctctaggtacgggcttcacggagcaacagtatgaaactgctgagaactgtcttgccttcctgacacaacaaggtttctcccttgagaacgccctctacgcatttcaagctgttgggatctacactctgggttgcgtcttgctggatcaagagctgcaagtcgctaaggaggagagggaaacacctactactgatagtatgccgccactggttcgacaagctttcgaactcagagatcaccaaggtgcagagccagccttcctgttcggccttgaactgatcatatgtggattggagaagcagctgaaggcagaaagtgggtct

SEQ ID NO: 1305 - DNA, 621 bp, Artificial Sequence
  synthetic construct; nucleotides encoding sulfonylurea responsive repressor
atggccagactcgacaagagcaaggtgatcaacagcgcactggagctgctgaacgaggtcggaatcgaaggcctcacaacccgtaagctcgcccagaagctcggggttgagcagcctacattgtactggcacgtcaagaacaagcgagctctgctagacgctatggccattgagatgttggataggcacaagacccactacctgcctttggaaggggaaagctggcaagacttcttgaggaacaaggctaagtccatgagaaatgctttgctcagtcaccgtgatggagccaaggtcgctctaggtacgggcttcacggagcaacagtatgaaactatggagaactcgcttgccttcctgacacaacaaggtttctcccttgagaacgccctctacgcaatgcaagctgttgggatctacactctgggttgcgtcttgctggatcaagagctgcaagtcgctaaggaggagagggaaacacctactactgatagtatgccgccactggttcgacaagcttacgaactcagagatcaccaaggtgcagagccagccttcctgttcggccttgaactgatcataagtggattggagaagcagctgaagtgtgaaagtgggtct

SEQ ID NO: 1306 - DNA, 621 bp, Artificial Sequence
  synthetic construct; nucleotides encoding sulfonylurea responsive repressor
atggccagactcgacaagagcaaggtgatcaacagcgcactggagctgctgaacgaggtcggaatcgaaggcctcacaacccgtaagctcgcccagaagctcggggttgagcagcctacattgtactggcacgtcaagaacaagcgagctctgctagacgctatggccattgagatgttggataggcacaagacccactactgtcctttggaaggggaaagctggcaagacttcttgaggaacagggctaagtccatgagaaatgctttgctcagtcaccgtgatggagccaaggtctgcctaggtacgggcttcacggagcaacagtatgaaactatggagaactcgcttgccttcctgacacaacaaggtttctcccttgagaacgccctctacgcatttcaagctgttgggatctacactctgggttgcgtcttgctggatcaagagctgcaagtcgctaaggaggagagggaaacacctactactgatagtatgccgccactggttcgacaagcttacgaactcagagatcaccaaggtgcagagccagccttcctgttcggccttgaactgatcataagtggattggagaagcagctgaaggcagaaagtgggtct

SEQ ID NO: 1307 - DNA, 619 bp, Artificial Sequence
  synthetic construct; nucleotides encoding sulfonylurea responsive repressor
atggccagactcgacaagagcaaggtgatcaacagcgcactggagctgctgaacgaggtcggaatcgaaggcctcacaacccgtaagctcgcccagaagctcggggttgagcagcctacattgtactggcacgtcaagaacaagcgagctctgctagacgctatggccattgagatgttcgataggcacaagacccactacctgcctttggaaggggaaagctggcaagacttcttgaggaacagggctaagtccatgagaaatgctttgctcagtcaccgtgatggagccaaggtcgctctaggtacgggcttcacggagcaacagtatgaaactatggagaactcgcttgccttcctgacacaacaaggtttctcccttgagaacgccctctacgcaatgcaagctgttgggatctacactctgggttgcgtcttgctggatcaagagctgcaagtcgctaaggaggagagggaaacacctactactgatagtatgccgccactggttcgacaagctatcgaactccacgatcaccaaggtgcagagccagccttcctgttcggccttgaactgatcataagtggattggagaagcagcaagtgtgaaagtgggtct

SEQ ID NO: 1308 - DNA, 621 bp, Artificial Sequence
  synthetic construct; nucleotides encoding sulfonylurea responsive repressor
atggccagactcgacaagagcaaggtgatcaacagcgcactggagctgctgaacgaggtcggaatcgaaggcctcacaacccgtaagctcgcccagaagctcggggttgagcagcctacattgtactggcacgtcaagaacaagcgagctctgctagacgctatggccattgagatgttggataggcacgccacccactactgtcctttggaaggggaaagctggcaagacttcttgaggaacaaggctaagtccatgagaaatgctttgctcagtcaccgtgatggagccaaggtcgctctaggtacgggcttcacggagcaacagtatgaaactatggagaactctcttgccttcctgacacaacaaggtttctcccttgagaacgccctctacgcaatgcaagctgttgggatctacactctgggttgcgtcttgctggatcaagagctgcaagtcgctaaggaggagagggaaacacctactactgatagtatgccgccactggttcgacaagcttacgaactcagagatcaccaaggtgcagagccagccttcctgttcggccttgaactgatcatatgtggattggagaagcagctgaagtgtgaaagtgggtct

SEQ ID NO: 1309 - DNA, 621 bp, Artificial Sequence; identical to SEQ ID NO: 822
  synthetic construct; nucleotides encoding sulfonylurea responsive repressor

SEQ ID NO: 1310 - DNA, 621 bp, Artificial Sequence
  synthetic construct; nucleotides encoding sulfonylurea responsive repressor
atggccagactcgacaagagcaaggtgatcaacagcgcactggagctgctgaacgaggtcggaatcgaaggcctcacaacccgtaagctcgcccagaagctcggggttgagcagcctacattgtactggcacgtcaagaacaagcgagctctgctagacgctatggccattgagatgttggataggcacaagacccactacctgcctttggaaggggaaagctggcaagacttcttgaggaacaaggctaagtccatgagaaatgctttgctcagtcaccgtgatggagccaaggtcgctctaggtacgggcttcacggagcaacagtatgaaactgctgagaactgtcttgccttcctgacacaacaaggtttctcccttgagaacgccctctacgcatttcaagctgttgggatctacactctgggttgcgtcttgctggatcaagagctgcaagtcgctaaggaggagagggaaacacctactactgatagtatgccgccactggttcgacaagctctcgaactcaaagatcaccaaggtgcagagccagccttcctgttcggccttgaactgatcataagtggattggagaagcagctgaagtgtgaaagtgggtct

SEQ ID NO: 1311 - DNA, 621 bp, Artificial Sequence
  synthetic construct; nucleotides encoding sulfonylurea responsive repressor
atggccagactcgacaagagcaaggtgatcaacagcgcactggagctgctgaacgaggtcggaatcgaaggcctcacaacccgtaagctcgcccagaagctcggggttgagcagcctacattgtactggcacgtcaagaacaagcgagctctgctagacgctatggccattgagatgttcgataggcacgacacccactacctgcctttggaaggggaaagctggcaagacttcttgaggaacaaggctaagtccatgagaaatgctttgctcagtcaccgtgatggagccaaggtcgctctaggtacgggcttcacggagcaacagtatgaaactatggagaactctcttgccttcctgacacaacaaggtttctcccttgagaacgccctctacgcaatgcaagctgttgggatctacactctgggttgcgtcttgctggatcaagagctgcaagtcgctaaggaggagagggaaacacctactactgatagtatgccgccactggttcgacaagcttacgaactcagagatcacaaaggtgcagagccagccttcctgttcggccttgaactgatcatatgtggattggagaagcagctgaagtgtgaaagtgggtct

SEQ ID NO: 1312 - DNA, 621 bp, Artificial Sequence
  synthetic construct; nucleotides encoding sulfonylurea responsive repressor
atggccagactcgacaagagcaaggtgatcaacagcgcactggagctgctgaacgaggtcggaatcgaaggcctcacaacccgtaagctcgcccagaagctcggggttgagcagcctacattgtactggcacgtcaagaacaagcgagctctgctagacgctatggccattgagatgttcgataggcacaagacccactactgtcctttggaaggggaaagctggcaagacttcttgaggaacagggctaagtccatgagaaatgctttgctcagtcaccgtgatggagccaaggtcgctctaggtacgggcttcacggagcaacagtatgaaactgctgagaactgtcttgccttcctgacacaacaaggtttctcccttgagaacgccctctacgcatttcaagctgttgggatctacactctgggttgcgtcttgctggatcaagagctgcaagtcgctaaggaggagagggaaacacctactactgatagtatgccgccactggttcgacaagctatcgaactccacgatcaccaaggtgcagagccagccttcctgttcggccttgaactgatcataagtggattggagaagcagctgaaggcagaaagtgggtct

SEQ ID NO: 1313 - DNA, 621 bp, Artificial Sequence
  synthetic construct; nucleotides encoding sulfonylurea responsive repressor
atggccagactcgacaagagcaaggtgatcaacagcgcactggagctgctgaacgaggtcggaatcgaaggcctcacaacccgtaagctcgcccagaagctcggggttgagcagcctacattgtactggcacgtcaagaacaagcgagctctgctagacgctatggccattgagatgttcgataggcacaagacccactactgtcctttggaaggggaaagctggcaagacttcttgaggaacagggctaagtccatgagaaatgctttgctcagtcaccgtgatggagccaaggtcgctctaggtacgggcttcacggagcaacagtatgaaactatggagaactgtcttgccttcctgacacaacaaggtttctcccttgagaacgccctctacgcaatgcaagctgttgggatctacactctgggttgcgtcttgctggatcaagagctgcaagtcgctaaggaggagagggaaacacctactactgatagtatgccgccactggttcgacaagcttacgaactcagagatcaccaaggtgcagagccagccttcctgttcggccttgaactgatcataagtggattggagaagcagctgaagtgtgaaagtgggtct

SEQ ID NO: 1314 - DNA, 621 bp, Artificial Sequence
  synthetic construct; nucleotides encoding sulfonylurea responsive repressor
atggccagactcgacaagagcaaggtgatcaacagcgcactggagctgctgaacgaggtcggaatcgaaggcctcacaacccgtaagctcgcccagaagctcggggttgagcagcctacattgtactggcacgtcaagaacaagcgagctctgctagacgctatggccattgagatgttcgataggcacaagacccactacctgcctttggaaggggaaagctggcaagacttcttgaggaacagggctaagtccatgagaaatgctttgctcagtcaccgtgatggagccaaggtcgctctaggtacgggcttcacggagcaacagtatgaaactatggagaactcgcttgccttcctgacacaacaaggtttctcccttgagaacgccctctacgcatttcaagctgttgggatctacactctgggttgcgtcttgctggatcaagagctgcaagtcgctaaggaggagagggaaacacctactactgatagtatgccgccactggttcgacaagcttacgaactcaaagatcaccaaggtgcagagccagccttcctgttcggccttgaactgatcatatgtggattggagaagcagctgaagtgtgaaagtgggtct

SEQ ID NO: 1315 - DNA, 621 bp, Artificial Sequence
  synthetic construct; nucleotides encoding sulfonylurea responsive repressor
atggccagactcgacaagagcaaggtgatcaacagcgcactggagctgctgaacgaggtcggaatcgaaggcctcacaacccgtaagctcgcccagaagctcggggttgagcagcctacattgtactggcacgtcaagaacaagcgagctctgctagacgctatggccattgagatgttggataggcacaagacccactacctgcctttggaaggggaaagctggcaagacttcttgaggaacagggctaagtccatgagaaatgctttgctcagtcaccgtgatggagccaaggtctgcctaggtacgggcttcacggagcaacagtatgaaactatggagaactcgcttgccttcctgacacaacaaggtttctcccttgagaacgccctctacgcatttcaagctgttgggatctacactctgggttgcgtcttgctggatcaagagctgcaagtcgctaaggaggagagggaaacacctactactgatagtatgccgccactggttcgacaagcttacgaactcagagatcaccaaggtgcagagccagccttcctgttcggccttgaactgatcataagtggattggagaagcagctgaagtgtgaaagtgggtct

SEQ ID NO: 1316 - DNA, 621 bp, Artificial Sequence
  synthetic construct; nucleotides encoding sulfonylurea responsive repressor
atggccagactcgacaagagcaaggtgatcaacagcgcactggagctgctgaacgaggtcggaatcgaaggcctcacaacccgtaagctcgcccagaagctcggggttgagcagcctacattgtactggcacgtcaagaacaagcgagctctgctagacgctatggccattgagatgttggataggcacaagacccactactgtcctttggaaggggaaagctggcaagacttcttgaggaacaaggctaagtccatgagaaatgctttgctcagtcaccgtgatggagccaaggtcgctctaggtacgggcttcacggagcaacagtatgaaactatggagaactctcttgccttcctgacacaacaaggtttctcccttgagaacgccctctacgcatttcaagctgttgggatctacactctgggttgcgtcttgctggatcaagagctgcaagtcgctaaggaggagagggaaacacctactactgatagtatgccgccactggttcgacaagcttacgaactcagagatcaccaaggtgcagagccagccttcctgttcggccttgaactgatcatatgtggattggagaagcagctgaagtgtgaaagtgggtct

SEQ ID NO: 1317 - DNA, 621 bp, Artificial Sequence
  synthetic construct; nucleotides encoding sulfonylurea responsive repressor
atggccagactcgacaagagcaaggtgatcaacagcgcactggagctgctgaacgaggtcggaatcgaaggcctcacaacccgtaagctcgcccagaagctcggggttgagcagcctacattgtactggcacgtcaagaacaagcgagctctgctagacgctatggccattgagatgttggataggcacaagacccactacctgcctttggaaggggaaagctggcaagacttcttgaggaacaaggctaagtccatgagaaatgctttgctcagtcaccgtgatggagccaaggtcgctctaggtacgggcttcacggagcaacagtatgaaactatggagaactcgcttgccttcctgacacaacaaggtttctcccttgagaacgccctctacgcaatgcaagctgttgggatctacactctgggttgcgtcttgctggatcaagagctgcaagtcgctaaggaggagagggaaacacctactactgatagtatgccgccactggttcgacaagcttacgaactcagagatcaccaaggtgcagagccagccttcctgttcggccttgaactgatcatatgtggattggagaagcagctgaaggcagaaagtgggtct

SEQ ID NO: 1318 - DNA, 621 bp, Artificial Sequence
  synthetic construct; nucleotides encoding sulfonylurea responsive repressor
atggccagactcgacaagagcaaggtgatcaacagcgcactggagctgctgaacgaggtcggaatcgaaggcctcacaacccgtaagctcgcccagaagctcggggttgagcagcctacattgtactggcacgtcaagaacaagcgagctctgctagacgctatggccattgagatgttggataggcacaagacccactacctgcctttggaaggggaaagctggcaagacttcttgaggaacagggctaagtccatgagaaatgctttgctcagtcaccgtgatggagccaaggtctgcctaggtacgggcttcacggagcaacagtatgaaactatggagaactgtcttgccttcctgacacaacaaggtttctcccttgagaacgccctctacgcatttcaagctgttgggatctacactctgggttgcgtcttgctggatcaagagctgcaagtcgctaaggaggagagggaaacacctactactgatagtatgccgtcactggttcgacaagcttacgaactcagagatcaccaaggtgcagagccagccttcctgttcggccttgaactgatcatatgtggattggagaagcagctgaagtgtgaaagtgggtct

SEQ ID NO: 1319 - DNA, 621 bp, Artificial Sequence
  synthetic construct; nucleotides encoding sulfonylurea responsive repressor
atggccagactcgacaagagcaaggtgatcaacagcgcactggagctgctgaacgaggtcggaatcgaaggcctcacaacccgtaagctcgcccagaagctcggggttgagcagcctacattgtactggcacgtcaagaacaagcgagctctgctagacgctatggccattgagatgttcgataggcacgccacccactactgtcctttggaaggggaaagctggcaagacttcttgaggaacaatgctaagtccaggagaaatgctttgctcagtcaccgtgatggagccaaggtcgctctaggtacgggcttcacggagcaacagtatgaaactatggagaactctcttgccttcctgacacaacaaggtttctcccttgagaacgccctctacgcaatgcaagctgttgggatctacactctgggttgcgtcttgctggatcaagagctgcaagtcgctaaggaggagagggaaacacctactactgatagtatgccgccactggttcgacaagcttacgaactcagagatcaccaaggtgcagagccagccttcctgttcggccttgaactgatcataagtggattggagaagcagctgaagtgtgaaagtgggtct

SEQ ID NO: 1320 - DNA, 621 bp, Artificial Sequence
  synthetic construct; nucleotides encoding sulfonylurea responsive repressor
atggccagactcgacaagagcaaggtgatcaacagcgcactggagctgctgaacgaggtcggaatcgaaggcctcacaacccgtaagctcgcccagaagctcggggttgagcagcctacattgtactggcacgtcaagaacaagcgagctctgctagacgctatggccattgagatgttcgataggcacaagacccactacctgcctttggaaggggaaagctggcaagacttcttgaggaacagggccaagtccatgagaaatgctttgctcagtcaccgtgatggagccaaggtcgctctaggtacgggcttcacggagcaacagtatgaaactatggagaactcgcttgccttcctgacacaacaaggtttctcccttgagaacgccctctacgcatttcaagctgttgggatctacactctgggttgcgtcttgctggatcaagagctgcaagtcgctaaggaggagagggaaacacctactactgatagtatgccgccactggttcgacaagcttacgaactcaaagatcaccaaggtgcagagccagccttcctgttcggccttgaactgatcatatgtggattggagaagcagctgaagtgtgaaagtgggtct

SEQ ID NO: 1321 - DNA, 620 bp, Artificial Sequence
  synthetic construct; nucleotides encoding sulfonylurea responsive repressor
atggccagactcgacaagagcaaggtgatcaacagcgcactggagctgctgaacgaggtcggaatcgaaggcctcacaacccgtaagctcgcccagaagctcggggttgagcagcctacattgtactggcacgtcaagaacaagcgagctctgctagacgctatggccattgagatgttcgataggcacgacacccactacctgcctttggaaggggaaagctggcaagacttcttgaggaacaaggctaagtccatgagaaatgctttgctcagtcaccgtgatggagccaaggtcgctctaggtacgggcttcacggagcaacagtatgaaactgctgagaactgtcttgccttcctgacacaacaaggtttctcccttgagaacgccctctacgcatttcaagctgttgggatctacactctgggttgcgtcttgctggatcaagagctgcaagtcgctaaggaggagagggaaacacctactactgatagtatgccgccactggttcgacaagctttcgaactcaaagatcaccaaggtgcagagccagccttcctgttcggccttgaactgatcatatgtggattggagaagcagtgaaggcagaaagtgggttt

SEQ ID NO: 1322 - DNA, 621 bp, Artificial Sequence
  synthetic construct; nucleotides encoding sulfonylurea responsive repressor
atggccagactcgacaagagcaaggtgatcaacagcgcactggagctgctgaacgaggtcggaatcgaaggcctcacaacccgtaagctcgcccagaagctcggggttgagcagcctacattgtactggcacgtcaagaacaagcgagctctgctagacgctatggccattgagatgttcgataggcacaagacccactactgtcctttggaaggggaaagctggcaagacttcttgaggaacaatgctaagtccatgagaaatgctttgctcagtcaccgtgatggagccaaggtcgctctaggtacgggcttcacggagcaacagtatgaaactatggagaactcgcttgccttcctgacacaacaaggtttctcccttgagaacgccctctacgcaatgcaagctgttgggatctacactctgggttgcgtcttgctggatcaagagctgcaagtcgctaaggaggagagggaaacacctactactgatagtatgccgccactggttcgacaagcttacgaactcaaagatcaccaaggtgcagagccagccttcctgttcggccttgaattgatcatatgtggattggagaagcagctgaaggcagaaagtgggtct

SEQ ID NO: 1323 - DNA, 621 bp, Artificial Sequence
  synthetic construct; nucleotides encoding sulfonylurea responsive repressor
atggccagactcgacaagagcaaggtgatcaacagcgcactggagctgctgaacgaggtcggaatcgaaggcctcacaacccgtaagctcgcccagaagctcggggttgagcagcctacattgtactggcacgtcaagaacaagcgagctctgctagacgctatggccattgagatgttggataggcacaagacccactactgtcctttggaaggggaaagctggcaagacttcttgaggaacaaggctaagtccatgagaaatgctttgctcagtcaccgtgatggagccaaggtctgcctaggtacgggcttcacggagcaacagtatgaaactatggagaactcgcttgccttcctgacacaacaaggtttctcccttgagaacgccctctacgcaatgcaagctgttgggatctacactctgggttgcgtcttgctggatcaagagctgcaagtcgctaaggaggagagggaaacacctactactgatagtatgccgccactggttcgacaagcttacgaactcagagatcaccaaggtgcagagccagccttcctgttcggccttgaactgatcatatgtggattggagaagcagctgaagtgtgaaagtgggtct

SEQ ID NO: 1324 - DNA, 621 bp, Artificial Sequence
  synthetic construct; nucleotides encoding sulfonylurea responsive repressor
atggccagactcgacaagagcaaggtgatcaacagcgcactggagctgctgaacgaggtcggaatcgaaggcctcacaacccgtaagctcgcccagaagctcggggttgagcagcctacattgtactggcacgtcaagaacaagcgagctctgctagacgctatggccattgagatgttggataggcacgacacccactactgtcctttggaaggggaaagctggcaagacttcttgaggaacaaggctaagtccatgagaaatgctttgctcagtcaccgtgatggagccaaggtcgctctaggtacgggcttcacggagcaacagtatgaaactatggagaactctcttgccttcctgacacaacaaggtttctcccttgagaacgccctctacgcatttcaagctgttgggatctacactctgggttgcgtcttgctggatcaagagctgcaagtcgctaaggaggagagggaaacacctactactgatagtatgccgccactggttcgacaagcttacgaactcagagatcaccaaggtgcagagccagccttcctgttcggccttgaactgatcataagtggattggagaagcagctgaagtgtgaaagtgggtct

SEQ ID NO: 1325 - DNA, 621 bp, Artificial Sequence
  synthetic construct; nucleotides encoding sulfonylurea responsive repressor
atggccagactcgacaagagcaaggtgatcaacagcgcactggagctgctgaacgaggtcggaatcgaaggcctcacaacccgtaagctcgcccagaagctcggggttgagcagcctacattgtactggcacgtcaagaacaagcgagctctgctagacgctatggccattgagatgttggataggcacgccacccactacctgcctttggaaggggaaagctggcaagacttcttgaggaacaaggctaagtccatgagaaatgctttgctcagtcaccgtgatggagccaaggtctgcctaggtacgggcttcacggagcaacagtatgaaactatggagaactcgcttgccttcctgacacaacaaggtttctcccttgagaacgccctctacgcaatgcaagctgttgggatctacactctgggttgcgtcttgctggatcaagagctgcaagtcgctaaggaggagagggaaacacctactactgatagtatgccgccactggttcgacaagcttacgaactcagagatcaccaaggtgcagagccagccttcctgttcggccttgaactgatcataagtggattggagaagcagctgaagtgtgaaagtgggtct

SEQ ID NO: 1326 - DNA, 621 bp, Artificial Sequence
  synthetic construct; nucleotides encoding sulfonylurea responsive repressor
atggccagactcgacaagagcaaggtgatcaacagcgcactggagctgctgaacgaggtcggaatcgaaggcctcacaacccgtaagctcgcccagaagctcggggttgagcagcctacattgtactggcacgtcaagaacaagcgagctctgctagacgctatggccattgagatgttcgataggcacgacacccactactgtcctttggaaggggaaagctggcaagacttcttgaggaacaaggctaagtccatgagaaatgctttgctcagtcaccgtgatggagccaaggtcgctctaggtacgggcttcacggagcaacagtatgaaactgctgagaactcgcttgccttcctgacacaacaaggtttctcccttgagaacgccctctacgcatttcaagctgttgggatctacactctgggttgcgtcttgctggatcaagagctgcaagtcgctaaggaggagagggaaacacctactactgatagtatgccgccactggttcgacaagctctcgaactccacgatcaccaaggtgcagagccagccttcctgttcggccttgaactgatcatatgtggattggagaagcagctgaagtgtgaaagtgggtct

SEQ ID NO: 1327 - DNA, 621 bp, Artificial Sequence
  synthetic construct; nucleotides encoding sulfonylurea responsive repressor
atggccagactcgacaagagcaaggtgatcaacagcgcactggagctgctgaacgaggtcggaatcgaaggcctcacaacccgtaagctcgcccagaagctcggggttgagcagcctacattgtactggcacgtcaagaacaagcgagctctgctagacgctatggccattgagatgttcgataggcacgccacccactacctgcctttggaaggggaaagctggcaagacttcttgaggaacagggctaagtccatgagaaatgctttgctcagtcaccgtgatggagccaaggtctgcctaggtacgggcttcacggagcaacagtatgaaactgctgagaactgtcttgccttcctgacacaacaaggtttctcccttgagaacgccctctacgcatttcaagctgttgggatctacactctgggttgcgtcttgctggatcaagagctgcaagtcgctaaggaggagagggaaacacctactactgatagtatgccgccactggttcgacaagctctcgaactccacgatcaccaaggtgcagagccagccttcctgttcggccttgaactgatcatatgtggattggagaagcagctgaagtgtgaaagtgggtct

SEQ ID NO: 1328 - DNA, 621 bp, Artificial Sequence
  synthetic construct; nucleotides encoding sulfonylurea responsive repressor
atggccagactcgacaagagcaaggtgatcaacagcgcactggagctgctgaacgaggtcggaatcgaaggcctcacaacccgtaagctcgcccagaagctcggggttgagcagcctacattgtactggcacgtcaagaacaagcgagctctgctagacgctatggccattgagatgttggataggcacgacacccactactgtcctttggaaggggaaacctggcaagacttcttgaggaacaaggctaagtccaggagaaatgctttgctcagtcaccgtgatggagccaaggtcgctctaggtacgggcttcacggagcaacagtatgaaactgctgagaactggcttgccttcctgacacaacaaggtttctcccttgagaacgccctctacgcaatgcaagctgttgggatctacactctgggttgcgtcttgctggatcaagagctgcaagtcgctaaggaggagagggaaacacctactactgatagtatgccgccactggttcgacaagcttacgaactcagagatcaccaaggtgcagagccagccttcctgttcggccttgaactgatcatatgtggattggagaagcagctgaagtgtgaaagtgggtct

SEQ ID NO: 1329 - DNA, 621 bp, Artificial Sequence
  synthetic construct; nucleotides encoding sulfonylurea responsive repressor
atggccagactcgacaagagcaaggtgatcaacagcgcactggagctgctgaacgaggtcggaatcgaaggcctcacaacccgtaagctcgcccagaagctcggggttgagcagcctacattgtactggcacgtcaagaacaagcgagctctgctagacgctatggccattgagatgttggataggcacaagacccactacctgcctttggaaggggaaagctggcaagacttcttgaggaacagggctaagtccatgagaaatgctttgctcagtcaccgtgatggagccaaggtctgcctaggtacgggcttcacggagcaacagtatgaaactgctgagaactcgcttgccttcctgacacaacaaggtttctcccttgagaacgccctctacgcatttcaagctgttgggatctacactctgggttgcgtcttgctggatcaagagctgcaagtcgctaaggaggagagggaaacacctactactgatagtatgccgccactggttcgacaagctttcgaactcaaagatcaccaaggtgcagagccagccttcctgttcggccttgaactgatcatatgtggattggagaagcagctgaagtgtgaaagtgggtct

SEQ ID NO: 1330 - DNA, 621 bp, Artificial Sequence
  synthetic construct; nucleotides encoding sulfonylurea responsive repressor
atggccagactcgacaagagcaaggtgatcaacagcgcactggagctgctgaacgaggtcggaatcgaaggcctcacaacccgtaagctcgcccagaagctcggggttgagcagcctacattgtactggcacgtcaagaacaagcgagctctgctagacgctatggccattgagatgttggataggcacaagacccactactgtcctttggaaggggaaagctggcaagacttcttgaggaacagggctaagtccatgagaaatgctttgctcagtcaccgtgatggagccaaggtctgcctaggtacgggcttcacggagcaacagtatgaaactgctgagaactctcttgccttcctgacacaacaaggtttctcccttgagaacgccctctacgcatttcaagctgttgggatctacactctgggttgcgtcttgctggatcaagagctgcaagtcgctaaggaggagagggaaacacctactactgatagtatgccgccactggttcgacaagctatcgaactcaaagatcaccaaggtgcagagccagccttcctgttcggccttgaactgatcatatgtggattggagaagcagctgaaggcagaaagtgggtct

SEQ ID NO: 1331 - DNA, 621 bp, Artificial Sequence
  synthetic construct; nucleotides encoding sulfonylurea responsive repressor
atggccagactcgacaagagcaaggtgatcaacagcgcactggagctgctgaacgaggtcggaatcgaaggcctcacaacccgtaagctcgcccagaagctcggggttgagcagcctacattgtactggcacgtcaagaacaagcgagctctgctagacgctatggccattgagatgttggataggcacaagacccactactgtcctttggaaggggaaagctggcaagacttcttgaggaacaaggctaagtccatgagaaatgctttgctcagtcaccgtgatggagccaaggtcgctctaggtacgggcttcacggagcaacagtatgaaactatggagaactctcttgccttcctgacacaacaaggtttctcccttgagaacgccctctacgcaatgcaagctgttgggatctacactctgggttgcgtcttgctggatcaagagctgcaagtcgctaaggaggagagggaaacacctactactgatagtatgccgccactggttcgacaagctttcgaactcaaagatcaccaaggtgcagagccagccttcctgttcggccttgaactgatcatatgtggattggagaagcagctgaagtgtgaaagtgggtct

SEQ ID NO: 1332 - DNA, 621 bp, Artificial Sequence
  synthetic construct; nucleotides encoding sulfonylurea responsive repressor
atggccagactcgacaagagcaaggtgatcaacagcgcactggagctgctgaacgaggtcggaatcgaaggcctcacaacccgtaagctcgcccagaagctcggggttgagcagcctacattgtactggcacgtcaagaacaagcgagctctgctagacgctatggccattgagatgttcgataggcacgccacccactacctgcctttggaaggggaaagctggcaagacttcttgaggaacagggctaagtccatgagaaatgctttgctcagtcaccgtgatggagccaaggtcgctctaggtacgggcttcacggagcaacagtatgaaactatggagaactctcttgccttcctgacacaacaaggtttctcccttgagaacgccctctacgcaatgcaagctgttgggatctacactctgggttgcgtcttgctggatcaagagctgcaagtcgctaaggaggagagggaaacacctactactgatagtatgccgccactggttcgacaagctttcgaactcaaagatcaccaaggtgcagagccagccttcctgttcggccttgaactgatcataagtggattggagaagcagctgaaggcagaaagtgggtct

SEQ ID NO: 1333 - DNA, 621 bp, Artificial Sequence
  synthetic construct; nucleotides encoding sulfonylurea responsive repressor
atggccagactcgacaagagcaaggtgatcaacagcgcactggagctgctgaacgaggtcggaatcgaaggcctcacaacccgtaagctcgcccagaagctcggggttgagcagcctacattgtactggcacgtcaagaacaagcgagctctgctagacgctatggccattgagatgttggataggcacaagacccactacctgcctttggaaggggaaagctggcaagacttcttgaggaacaaggctaagtccatgagaaacgctttgctcagtcaccgtgatggagccaaggtctgcctaggtacgggcttcacggagcaacagtatgaaactgctgagaactgtcttgccttcctgacacaacaaggtttctcccttgagaacgccctctacgcatttcaagctgttgggatctacactctgggttgcgtcttgctggatcaagagctgcaagtcgctaaggaggagagggaaacacctactactgatagtatgccgccactggttcgacaagctctcgaactcaaagatcaccaaggtgcagagccagccttcctgttcggccttgaactgatcataagtggattggagaagcagctgaaggcagaaagtgggtct

SEQ ID NO: 1334 - DNA, 621 bp, Artificial Sequence
  synthetic construct; nucleotides encoding sulfonylurea responsive repressor
atggccagactcgacaagagcaaggtgatcaacagcgcactggagctgctgaacgaggtcggaatcgaaggcctcacaacccgtaagctcgcccagaagctcggggttgagcagcctacattgtactggcacgtcaagaacaagcgagctctgctagacgctatggccattgagatgttggataggcacaagacccactactgtcctttggaaggggaaagctggcaagacttcttgaggaacaatgctaagtccatgagaaatgctttgctcagtcaccgtgatggagccaaggtctgcctaggtacgggcttcacggagcaacagtatgaaactatggagaactcgcttgccttcctgacacaacaaggtttatcccttgagaacgccctctacgcaatgcaagctgttgggatctacactctgggttgcgtcttgctggatcaagagctgcaagtcgctaaggaggagagggaaacacctactactgatagtatgccgccactggttcgacaagcttacgaactcaaagatcaccaaggtgcagagccagccttcctgttcggccttgaactgatcatatgtggattggagaagcagctgaagtgtgaaagtgggtct

SEQ ID NO: 1335 - DNA, 621 bp, Artificial Sequence
  synthetic construct; nucleotides encoding sulfonylurea responsive repressor
atggccagactcgacaagagcaaggtgatcaacagcgcactggagctgctgaacgaggtcggaatcgaaggcctcacaacccgtaagctcgcccagaagctcggggttgagcagcctacattgtactggcacgtcaagaacaagcgagctctgctagacgctatggccattgagatgttggataggcacaagacccactacctgcctttggaaggggaaagctggcaagacttcttgaggaacagggctaagtccatgagaaatgctttgctcagtcaccgtgatggagccaaggtcgctctaggtacgggcttcacggagcaacagtatgaaactatggagaactcgcttgccttcctgacacaacaaggtttctcccttgagaacgccctctacgcaatgcaagctgttgggatctacactctgggttgcgtcttgctggatcaagagctgcaagtcgctaaggaggagagggaaacacctactactgatagtatgccgccactggttcgacaagctttcgaactcagagatcaccaaggtgcagagccagccttcctgttcggccttgaactgatcataagtggattggagaagcagctgaaggcagaaagtgggtct

SEQ ID NO: 1336 - DNA, 621 bp, Artificial Sequence
  synthetic construct; nucleotides encoding sulfonylurea responsive repressor
atggccagactcgacaagagcaaggtgatcaacagcgcactggagctgctgaacgaggtcggaatcgaaggcctcacaacccgtaagctcgcccagaagctcggggttgagcagcctacattgtactggcacgtcaagaacaagcgagctctgctagacgctatggccattgagatgttggataggcacaagacccactacctgcctttggaaggggaaagctggcaagacttcttgaggaacaaggctaagtccatgagaaatgctttgctcagtcaccgtgatggagccaaggtctgcctaggtacgggcttcacggagcaacagtatgaaactgctgagaactctcttgccttcctgacacaacaaggtttctcccttgagaacgccctctacgcatttcaagctgttgggatctacactctgggttgcgtcttgctggatcaagagctgcaagtcgctaaggaggagagggaaacacctactactgatagtatgccgccactggttcgacaagctttcgaactcaaagatcaccaaggtgcagagccagccttcctgttcggccttgaactgatcatatgtggattggagaagcagctgaagtgtgaaagtgggtct

SEQ ID NO: 1337 - DNA, 621 bp, Artificial Sequence
  synthetic construct; nucleotides encoding sulfonylurea responsive repressor
atggccagactcgacaagagcaaggtgatcaacagcgcactggagctgctgaacgaggtcggaatcgaaggcctcacaacccgtaagctcgcccagaagctcggggttgagcagcctacattgtactggcacgtcaagaacaagcgagctctgctagacgctatggccatagagatgctcgatcggcaccaagttcacaacttacccttggaaggggaaagctggcaagatttcttgaggaactgggctaagtccatgagaaatgctttgctcagtcaccgtgatggagccaaggtctgtctaggtacgggcttcacggagcgacaatatgaaacttctgagaacaagcttgccttcctgacacaacaaggtttctcccttgagaacgccctctacgccttccaagcagtggggatctacactctgggttgtgtcttgctggatcaagagctgcaagtcgctaaggaggagagggaaacacctactactgatagtatgccgccactggttcgacaagctattgaactcgcggatcaccaaggtgcagagccagccttcctgttcggccttgaactgatcatatcaggattggagaagcagctgaaggccgaaagtgggtct

SEQ ID NO: 1338 - DNA, 621 bp, Artificial Sequence
  synthetic construct; nucleotides encoding sulfonylurea responsive repressor
atggccagactcgacaagagcaaggtgatcaacagcgcactggagctgctgaacgaggtcggaatcgaaggcctcacaacccgtaagctcgcccagaagctcggggttgagcagcctacattgtactggcacgtcaagaacaagcgagctctgctagacgctatggccttagagatgctcgatcggcacaagactcactacttacccttggaaggggaaagctggcaaaatttcttgaggaactgggctaagtccatgagaaatgctttgctcagtcaccgtgatggagccaaggtctgtctaggtacgggcttcacggagcaacaatatgaaactatggagaactcgcttgccttcctgacacaacaaggtttctcccttgagaacgccctctacgcattccaagcagtggggatctacactctgggttgtgtcttgctggatcaagagctgcaagtcgctaaggaggagagggatacacctactactgatagtatgccgccactggttcgacaagctattgaactcgcggatcaccaaggtgcagagccagccttcctgttcggccttgaactgatcatatcaggattggagaagcagctgaaggccgaaagtgggtct

SEQ ID NO: 1339 - DNA, 621 bp, Artificial Sequence
  synthetic construct; nucleotides encoding sulfonylurea responsive repressor
atggccagactcgacaagagcaaggtgatcaacagcgcactggagctgctgaacgaggtcggaatcgaaggcctcacaacccgtaagctcgcccagaagctcggggttgagcagcctacattgtactggcacgtcaagaacaagcgagctctgctagacgctatggccatagagatgctcgatcggcaccggactcactacttacccttggaaggggaaagctggcaaaatttcttgaggaacaaggctaagtccatgagaaatgctttgctcagtcaccgtgatggagccaaggtcgcactaggtacgggcttcacggagaaacaatatgaaactcaagagaactcgcttgccttcctgacacaacaaggtttctcccttgagaacgccctctacgcaaatcaagcagtggggatctacactctgggttgtgtcttgctggatcaagagctgcaggtcgctaaggaggagagggaaacacctactactgatagtatgccgccactggttcgacaagctattgaactcgcggatcaccaaggtgcagagccagccttcctgttcggccttgaagtgatcatatcaggattggagaagcagctgaaggccgaaagtgggtct

SEQ ID NO: 1340 - DNA, 621 bp, Artificial Sequence
  synthetic construct; nucleotides encoding sulfonylurea responsive repressor
atggccagactcgacaagagcaaggtgatcaacagcgcactggagctgctgaacgaggtcggaatcgaaggcctcacaacccgtaagctcgcccagaagctcggggttgagcagcctacattgtactggcacgtcaagaacaagcgagctctgctagacgctatggccatagagatgctcgatcggcaccaaattcactacttacccttggaaggggaaagctggcaagatttcttgaggaactgggctaagtccatgagaaatgctttgctcagtcaccgtgatggagccaaggtctgtctaggtacgggcttcacggagcaacaatatgaaactgctgagaactcgcttgccttcctgacacaacaaggtttctcccttgagaacgccctctacgcattccaagcagtggggatctacactctgggttgtgtcttgctggatcaagagctgaaagtcgctaaggaggagagggaaacacctactactgatagtatgccgccactggttcgacaagcttttgaactcgcggatcaccaaggtgcagagccagccttcctgttcggccttgaacagatcatatcaggattggagaagcagctgaaggtcgaaagtgggtct

SEQ ID NO: 1341 - DNA, 621 bp, Artificial Sequence
  synthetic construct; nucleotides encoding sulfonylurea responsive repressor
atggccagactcgacaagagcaaggtgatcaacagcgcactggagctgctgaacgaggtcggaatcgaaggcctcacaacccgtaagctcgcccagaagctcggggttgagcagcctacattgtactggcacgtcaagaacaagcgagctctgctagacgctatggccagagagatgctcgatcggcacacgattcactacctacccttggaaggggaaagctggcaaaatttcttgaggaacagggctaagtccatgagaaatgctttgctcagtcaccgtgatggagccaaggtctgtctaggtacgggcttcacggagcaacaatatgaaactatggagaactcgcttgccttcctgacacaacaaggtttctcccttgagaacgccctctacgcaatgcaagcagtggggatctacactctgggttgtgtcttgctggatcaagagctgcaagtcgctaaggaggagagggaaacacctactactgatagtatgccgccactggttcgacaagcttacgaactcgcggatcaccaaggtgcagagccagccttcctgttcggccttgaactgatcatatcaggattggagaagcagctgaaggccgaaagtgggtct

SEQ ID NO: 1342 - DNA, 621 bp, Artificial Sequence
  synthetic construct; nucleotides encoding sulfonylurea responsive repressor
atggccagactcgacaagagcaaggtgatcaacagcgcactggagctgctgaacgaggtcggaatcgaaggcctcacaacccgtaagctcgcccagaagctcggggttgagcagcctacattgtactggcacgtcaagaacaagcgagctctgctagacgctatggccatagagatgctcgatcggcaccaaattcactacttacccttggaaggggaaagctggcaaaatttcttgaggaacagggctaagtccatgagaaatgctttgctcagtcaccgtgatggagccaaggtctgtctaggtacgggcttcacggagcaacaatatgaaactatggagaactcgcttgccttcctgacacaacaaggtttctcccttgagaacgccctctacgcattccaagcagtggggatctacactctgggttgtgtcttgctggatcaagagctgcaagtcgctaaggaggagagggaaacacctactactgatagtatgccgccactggttcgacaagctgttgaactcgcggatcaccaaggtgcagagccagccttcctgttcggccttgaactgatcatatcaggattggagaagcagctgaaggccgaaagtgggtct

SEQ ID NO: 1343 - DNA, 621 bp, Artificial Sequence
  synthetic construct; nucleotides encoding sulfonylurea responsive repressor
atggccagactcgacaagagcaaggtgatcaacagcgcactggagctgctgaacgaggtcggaatcgaaggcctcacaacccgtaagctcgcccagaagctcggggttgagcagcctacattgtactggcacgtcaagaacaagcgagctctgctagacgctatggccatagagatgctcgatcggcacaggactcactacttacccttggaaggggaaagctggcaaaatttcttgaggaacaaggctaagtccatgagaaatgctttgctcagtcaccgtgatggagccaaggtctgtctaggtacgggcttcacggagagacaatatgaaactcaagagaactcgcttgccttcctgacacaacaaggtttctcccttgagaacgccctctacgcaaatcaagcagtggggatctacactctgggttgtgtcttgctggatcaagagctgcaagtcgctaaggaggagagggaaacacctactactgatagtatgccgccactggttcgacaagctattgaactcaatgatcaccaaggtgcagagccagccttcctgttcggccttgaactgatcatatcaggattggagaagcagctgaaggccgaaagtgggtct

SEQ ID NO: 1344 - DNA, 621 bp, Artificial Sequence
  synthetic construct; nucleotides encoding sulfonylurea responsive repressor
atggccagactcgacaagagcaaggtgatcaacagcgcactggagctgctgaacgaggtcggaatcgaaggcctcacaacccgtaagctcgcccagaagctcggggttgagcagcctacattgtactggcacgtcaagaacaagcgagctctgctagacgctatggccatagagatgctcgatcggcacaggactcactacttacccttggaaggggaaagctggcaagatttcttgaggaactgggctaagtccatgagaaatgctttgctcagtcaccgtgatggagccaaggtcgcactaggtacgggcttcacggagcaacaatatgaaactatggagaactcgcttgccttcctgacacaacaaggtttctcccttgagaacgccctctacgcaaatcaagcagtggggatctacactctgggttgtgtcttgctggatcaagagctgcaagtcgctaaggaggagagggaaacacctactactgatagtttgccgccactggttcgacaagcttttgaactctccgatcaccaaggtgcagagccagccttcctgttcggccttgaactgatcatatcaggattggagaagcagctgaaggccgaaagtgggtct

SEQ ID NO: 1345 - DNA, 621 bp, Artificial Sequence
  synthetic construct; nucleotides encoding sulfonylurea responsive repressor
atggccagactcgacaagagcaaggtgatcaacagcgcactggagctgctgaacgaggtcggaatcgaaggcctcacaacccgtaagctcgcccagaagctcggggttgagcagcctacattgtactggcacgtcaagaacaagcgagctctgctagacgctatggccatagagatgctcgatcggcacaggattcactacttacccttggaaggggaaagctggcaaaatttcttgaggaactgggctaagtccatgagaaatgctttgctcagtcaccgtgatggagccaaggtctgtctaggtacgggcttcacggagcaacaatatgaaacttctgagaactcgcttgccttcctgacacaacaaggtttctcccttgagaacgccctctacgcaatgcaagcagtggggatctacactctgggttgtgtcttgctggatcaagagctgcaagtcgctaaggaggagagggaaacacctacaactgatagtatgccgccactggttcgacaagctgttgaactcaatgatcaccaaggtgcagagccagccttcctgttcggccttgaacagatcatatcaggattggagaagcagctgaaggccgaaagtgggtct

SEQ ID NO: 1346 - DNA, 621 bp, Artificial Sequence
  synthetic construct; nucleotides encoding sulfonylurea responsive repressor
atggccagactcgacaagagcaaggtgatcaacagcgcactggagctgctgaacgaggtcggaatcgaaggcctcacaacccgtaagctcgcccagaagctcggggttgagcagcctacattgtactggcacgtcaagaacaagcgagctctgctagacgctatggccatagagatgctcgatcggcaccaaattcactacttacccttggaaggggaaagctggcaagatttcttgaggaacaaggctaagtccatgagaaatgctttgctcagtcaccgtgatggagccaaggtctgtctaggtacgggcttcacggagcaacaatatgaaactgctgagaactcgcttgccttcctgacacaacaaggtttctcccttgagaacgccctctacgcaaatcaagcagtggggatctacactctgggttgtgtcttgctggatcaagagctgcaagtcgctaaggaggagagggaaacacctactactgatagtatgccgccactggttcgacaagctattgaactcaatgatcaccaaggtgcagagccagccttcctgttcggccttgaactgatcatatcaggattggagaagcagctgaaggccgaaagtgggtcc

SEQ ID NO: 1347 - DNA, 621 bp, Artificial Sequence
  synthetic construct; nucleotides encoding sulfonylurea responsive repressor
atggccagactcgacaagagcaaggtgatcaacagcgcactggagctgctgaacgaggtcggaatcgaaggcctcacaacccgtaagctcgcccagaagctcggggttgagcagcctacattgtactggcacgtcaagaacaagcgagctctgctagacgctatggccgtagagatgctcgatcggcaccaaactcactacttacccttggaaggggaaagctggcaagatttcttgaggaactgggctaagtccatgagaaatgctttgctcagtcaccgtgatggagccaaggtctgtctaggtacgggcttcacggagcaacaatatgaaactatggagaactcgcttgccttcctgacccaacaaggtttctcccttgagaacgccctctacgcattccaagcagtggggatctacactctgggttgtgtcttgctggatcaagagctgcaagtcgctaaggaggagagggaaacacctactactgatagtatgccgccactggttcgacaagctgttgaactcgcggatcaccaaggtgcagagccagccttcctgttcggccttgaactgatcatatcaggattggagaagcagctgaaggccgaaagtgggtct

SEQ ID NO: 1348 - DNA, 621 bp, Artificial Sequence
  synthetic construct; nucleotides encoding sulfonylurea responsive repressor
atggccagactcgacaagagcaaggtgatcaacagcgcactggagctgctgaacgaggtcggaatcgaaggcctcacaacccgtaagctcgcccagaagctcggggttgagcagcctacattgtactggcacgtcaagaacaagcgagctctgctagacgctatggccatagagatgctcgatcggcacaggactcactacttacccttggaaggggaaagctggcaagatttcttgaggaacaaggctaagtccatgagaaatgctttgctcagtcaccgtgatggagccaaggtctgtctaggtacgggcttcacggagagacaatatgaaactcaagagaacaaccttgccttcctgacacaacaaggtttctcccttgagaacgccctctacgcaaatcaagcagtggggatctacactctgggttgtgtcttgctggatcaagagctgcaagtcgctaaggaggagagggaaacacctactactgatagtatgccgccactggttcgacaagcttttgaactcgcggatcaccaaggtgcagagccagccttcctgttcggccttgaactgatcatatcaggattggagaagcagctgaaggccgaaagtgggtct

SEQ ID NO: 1349 - DNA, 621 bp, Artificial Sequence
  synthetic construct; nucleotides encoding sulfonylurea responsive repressor
atggccagactcgacaagagcaaggtgatcaacagcgcactggagctgctgaacgaggtcggaatcgaaggcctcacaacccgtaagctcgcccagaagctcggggttgagcagcctacattgtactggcacgtcaagaacaagcgagctctgctagacgctatggccatagagatgctcgatcggcacaggattcactacttacccttggaaggggaaagctggcaagatttcttgaggaacaaggctaagtccatgagaaatgctttgctcagtcaccgtgatggagccaaggtctgtctaggtacgggcttcacggagcaacaatatgaaactcaagagaactcgcttgccttcctgacacaacaaggtttctcccttgagaacgccctctacgcaaatcaagcagtggggatctacactctgggttgtgtcttgctggatcaagagctgcaagtcgctaaggaggagagggaaacacctactactgatagtatgccgccactggttcgacaagctattgaactcgcggatcaccaaggtgcagagccagccttcctgttcggccttgaactgatcatatcaggattggagaagcagctgaaggccgaaagtgggtct

SEQ ID NO: 1350 - DNA, 621 bp, Artificial Sequence
  synthetic construct; nucleotides encoding sulfonylurea responsive repressor
  misc_feature (190)..(192): n is a, c, g, or t
  misc_feature (218)..(218): n is a, c, g, or t
  misc_feature (244)..(246): n is a, c, g, or t
  misc_feature (298)..(300): n is a, c, g, or t
  misc_feature (322)..(322): n is a, c, g, or t
  misc_feature (346)..(347): n is a, c, g, or t
  misc_feature (529)..(530): n is a, c, g, or t
atggccagactcgacaagagcaaggtgatcaacagcgcactggagctgctgaacgaggtcggaatcgaaggcctcacaacccgtaagctcgcccagaagctcggggttgagcagcctacattgtactggcacgtcaagaacaagcgagctctgctagacgctatggccatagagatgctcgatcggcacnnnattcactacttacccttggaaggggnaagctggcaagatttcttgaggaacnnngctaagtccatgagaaatgctttgctcagtcaccgtgatggagccaaggtcnnnctaggtacgggcttcacggagnaacaatatgaaactatggagaacnnccttgccttcctgacacaacaaggtttctcccttgagaacgccctctacgcaatgcaagcagtggggatccacactctgggttgtgtcttgctggatcaagagctgcaagtcgctaaggaggagagggaaacacctactactgatagtatgccgccactggttcgacaagcttttgaactcnnggatcaccaaggtgcagagccagccttcctgttcggccttgaactgatcatatcaggattggagaagcagctgaaggccgaaagtgggtct

SEQ ID NO: 1351 - DNA, 621 bp, Artificial Sequence
  synthetic construct; nucleotides encoding sulfonylurea responsive repressor
atggccagactcgacaagagcaaggtgatcaacagcgcactggagctgctgaacgaggtcggaatcgaaggcctcacaacccgtaagctcgcccagaagctcggggttgagcagcctacattgtactggcacgtcaagaacaagcgagctctgctagacgctatggccaaagagatgctggatcggcaccaaactcactacttacccttggaaggggaaagctggcaaaatttcttgaggaactgggctaagtccatgagaaatgctttgctcagtcaccgtgatggagccaaggtctgtctaggtacgggcttcacggagagacaatatgaaactgctgagaacaaccttgccttcctgaaacaacaaggtttctcccttgagaacgccctctacgcaaatcaagcagtggggatctacactctgggttgtgtcttgctggatcaagagctgcaagtcgctaaggaggagagggaaacacctactgctgatagtatgccgccactggttcgacaagctattgaactcaatgatcaccaaggtgcagagccagccttcctgttcggccttgaactgatcatatcaggattggagaagcagctgaaggccgaaagtgggtct

SEQ ID NO: 1352 - DNA, 621 bp, Artificial Sequence
  synthetic construct; nucleotides encoding sulfonylurea responsive repressor
atggccagactcgacaagagcaaggtgatcaacagcgcactggagctgctgaacgaggtcggaatcgaaggcctcacaacccgtaagctcgcccagaagctcggggttgagcagcctacattgtactggcacgtcaagaacaagcgagctctgctagacgctatggccatagagatgctcgatcggcacaagactcactacttacccttggaaggggaaagctggcaagatttcttgaggaacaaggctaagtccatgagaaatgctttgctcagtcaccgtgatggagccaaggtcgcactaggtacgggcttcacggagaatcaatatgaaactgctgagaactcgcttgccttcctgacacaacaaggtttctcccttgagaacgccctctacgcattccaagcagtggggatctacactctgggttgtgtcttgctggatcaagagctgcaagtcgctaaggaggagagggaaacacctactactgatagtatgccgccactggttcgacaagctgttgaactcgcggatcaccaaggtgcagagccagccttcctgttcggccttgaactgatcatatcaggattggagaagcagctgaaggccgaaagtgggtct

SEQ ID NO: 1353 - DNA, 621 bp, Artificial Sequence
  synthetic construct; nucleotides encoding sulfonylurea responsive repressor
atggccagactcgacaagagcaaggtgatcaacagcgcactggagctgctgaacgaggtcggaatcgaaggcctcacaacccgtaagctcgcccagaagctcggggttgagcagcctacattgtactggcacgtcaagaacaagcgagctctgctagacgctatggccatagagatgctcgatcggcaccaaattcactacttacccttggaaggggaaagctggcaagatttcttgaggaacagggctaagtccatgagaaatgctttgctcagtcaccgtgatggagccaaggtctgtctaggtacgggctacacggagcaacaatatgaaacttctgagaactcgcttgccttcctgacacaacaaggtttctcccttgagaacgccctctacgcattccaagcagtggggatctacactctgggttgtgtcttgctggatcaagagctgcaagtcgctaaggtggagagggaaacacctattactgatagtatgccgccactggttcgacaagctgttgaactcaatgatcaccaaggtgcagagccagccttcctgttcggccttgaactgatcatatcaggattggagaagcagctgaaggccgaaagtgggtct

SEQ ID NO: 1354 - DNA, 621 bp, Artificial Sequence
  synthetic construct; nucleotides encoding sulfonylurea responsive repressor
atggccagactcgacaagagcaaggtgatcaacagcgcactggagctgctgaacgaggtcggaatcgaaggcctcacaacccgtaagctcgcccagaagctcggggttgagcagcctacattgtactggcacgtcaagaacaagcgagctctgctagacgctatggccatagagatgctcgatcggcaccaaactcactacttacccttggaaggggaaagctggcaagatttcttgaggaacaaggctaagtccatgagaaatgctttgctcagtcaccgtgatggagccaaggtcgcactaggtacgggcttcacggagaaacaatatgaaactcaagagaactcgcttgccttcctgacacaacaaggtttctcccttgagaacgccctctacgcaaatcaagcagtggggatctacactctgggttgtgtcttgctggatcaagagctgcaagtcgctaaggaggagagggaaacacctactactgatagtatgccgccactggttcgacaagcttttgaactcgcggatcaccaaggtgcagagccagccttcctgttcggccttgaactgatcatatcaggattggagaagcagctgaaggccgaaagtgggtct

SEQ ID NO: 1355 - DNA, 621 bp, Artificial Sequence
  synthetic construct; nucleotides encoding sulfonylurea responsive repressor
atggccagactcgacaagagcaaggtgatcaacagcgcactggagctgctgaacgaggtcggaatcgaaggcctcacaacccgtaagctcgcccagaagctcggggttgagcagcctacattgtactggcacgtcaagaacaagcgagctctgctagacgctatggccatagagatgctcgatccgcacaagattcactacttacccttggaaggggaaagctggcaagatttcttgaggaacagggctaagtccatgagaaatgctttgctcagtcaccgtgatggagccaaggtctgtctaggtacgggcttcacggagcgacaatatgaaactgctgagaacacgcttgccttcctgacacaacaaggtttctcccttgagaacgccctctacgcattccaagcagtggggatctacactctgggttgtgtcttgctggatcaagagctgcaagtcgctaaggaggagagggaaacacctactactgatagtatgccgccactggttcgacaagcttacgaactcgcggatcaccaaggtgcagagccagccttcctgttcggccttgaactgatcatatcaggattggagaagcagctgaaggccgaaagtgggtct

SEQ ID NO: 1356 - DNA, 621 bp, Artificial Sequence
  synthetic construct; nucleotides encoding sulfonylurea responsive repressor
atggccagactcgacaagagcaaggtgatcaacagcgcactggagctgctgaacgaggtcggaatcgaaggcctcacaacccgtaagctcgcccagaagctcggggttgagcagcctacattgtactggcacgtcaagaacaagcgagctctgctagacgctatggccatagagatgctcgatcggcacaggactcactacttacccttggaaggggaaagctggcaagatttcttgaggaacagggctaagtccatgagaaatgctttgctcagtcaccgtgatggagccaaggtctgtctaggtacgggcttcacggagaaacaatatgaaactcaagagaactcgcttgccttcctgacacaacaaggtttctcccttgagaacgccctctacgcaaatcaagcagtggggatctacactctgggttgtgtcttgctggatcaagagctgcaggtcgctaaggaggagagggaaacacctactactgatagtatgccgccactggttcgacaagcttttgaactcaatgatcaccaaggtgcagagccagccttcctgttcggccttgaactgctcatatcaggattggagaagcagctgaaggccgaaagtgggtct

SEQ ID NO: 1357 - DNA, 621 bp, Artificial Sequence
  synthetic construct; nucleotides encoding sulfonylurea responsive repressor
atggccagactcgacaagagcaaggtgatcaacagcgcactggagctgctgaacgaggtcggaatcgaaggcctcacaacccgtaagctcgcccagaagctcggggttgagcagcctacattgtactggcacgtcaagaacaagcgagctctgctagacgctatggccatagagatgctcgatcggcacaggattcactacttacccttggaaggggaaagctggcaagatttcttgaggaacagggctaagtccatgagaaatgctttgctcagtcaccgtgatggagccaaggtctgtctaggtacgggcttcacggagcaacaatatgaaactgctgagaacaaccttgccttcctgacacaacaaggtttctcccttgagaacgccctctacgcaaatcaagcagtggggatctacactctgggttgtgtcttgctggttcaagagctgcatgtcgctaaggaggagagggaaacacctactactgatagtatgccgccactggttcgacaagctgttgaactcttcgatcaccaaggtgcagagccagccttcctgttcggccttgaactgatcatatcaggattggagaagcagctgaaggccgaaagtgggtct

SEQ ID NO: 1358 - DNA, 621 bp, Artificial Sequence
  synthetic construct; nucleotides encoding sulfonylurea responsive repressor
atggccagactcgacaagagcaaggtgatcaacagcgcactggagctgctgaacgaggtcggaatcgaaggcctcacaacccgtaagctcgcccagaagctcggggttgagcagcctacattgtactggcacgtcaagaacaagcgagctctgctagacgctatggccatagagatgctcgatcggcacaagactcactacttacccttggaaggggaaagctggcaagatttcttgaggaacagggctaagtccatgagaaatgctttgctcagtcaccgtgatggagccaaggtctgtctaggtacgggcttcacggagcaacaatatgaaactatggagaactcgcttgccttcctgacacaacaaggtttctcccttgagaacgccctctacgcattccaagcagtggggatctacactctgggttgtgtcttgctggagcaagagctgcaagtcgctaaggaggagagggaaacacctactactgatagtatgccgccactggttcgacaagctgttgaactcgcggatcaccaaggtgcagagccagccttcctgttcggacttgaactgatcatatcaggattggagaagcagctgaaggccgaaagtgggtct

SEQ ID NO: 1359 - DNA, 621 bp, Artificial Sequence
  synthetic construct; nucleotides encoding sulfonylurea responsive repressor
atggccagactcgacaagagcaaggtgatcaacagcgcactggagctgctgaacgaggtcggaatcgaaggcctcacaacccgtaagctcgcccagaagctcggggttgagcagcctacattgtactggcacgtcaagaacaagcgagctctgctagacgctatggccatagagatgctcgatcggcacaggactcactacttacccttggaaggggaaagctggcaagatttcttgaggaacagggctaagtccatgagaaatgctttgctcagtcaccgtgatggagccaaggtcgcactaggtacgggcttcacggagagacaatatgaaactcaagagaactcgcttgccttcctgacacaacaaggtttctcccttgagaacgccctctacgcaaatcaagcagtggggatctacactctgggttgtgtcttgctggatcaagagctgcaagtcgctaaggaggagagggaaacacctactactgatagtatgccgccactggttcgacaagctattgaactcaatgatcaccaaggtgcagagccagccttcctgttcggccttgaactgatcatatcaggattggagaagcagctgaaggccgaaagtgggtct

SEQ ID NO: 1360 - DNA, 621 bp, Artificial Sequence
  synthetic construct; nucleotides encoding sulfonylurea responsive repressor
atggccagactcgacaagagcaaggtgatcaacagcgcactggagctgctgaacgaggtcggaatcgaaggcctcacaacccgtaagctcgcccagaagctcggggttgagcagcctacattgtactggcacgtcaagaacaagcgagctctgctagacgctatggccatagagatgctcgatcggcacaagattcactacttacccttggaaggggaaagctggcaagatttcttgaggaacagggctaagtccatgagaaatgctttgctcagtcaccgtgatggagccaaggtcgcactaggtacgggcttcacggagaaacaatatgaaactcaagagaacaaccttgccttcctgacacaacaaggtttctcccttgagaacgccctctacgcaaatcaagcagtggggatatacactctgggttgtgtcttgctggatcaagagctgcaagtcgctaaagaggagagggaaacacctactactgatagtatgccgccactggttcgacaagcttttgaactcaatgatcaccaaggtgcagagccagccttcctgttcggccttgaactgatcatatcaggattggagaagcagctgaaggccgaaagtgggtct

SEQ ID NO: 1361 - DNA, 621 bp, Artificial Sequence
  synthetic construct; nucleotides encoding sulfonylurea responsive repressor
atggccagactcgacaagagcaaggtgatcaacagcgcactggagctgctgaacgaggtcggaatcgaaggcctcacaacccgtaagctcgcccagaagctcggggttgagcagcctacattgtactggcacgtcaagaacaagcgagctctgctagatgctatggccatagagatgctcgatcggcacaagattcactacttacccttggaaggggaaagctggcaggatttcttgaggaactgggctaagtccatgagaaatgctttgctcagtcaccgtgatggagccaaggtcgcactaggtacgggcttcacggagcaacaatatgaaacttctgagaactcgcttgccttcctgacacaacaaggtttctcccttgagaacgccctctacgcattccaagcagtggggatctacactctgggttgtgtcttgctggatcaagagctgcaagtcgctaaggaggagagggaaacacctattactgatagtatgccgccactggttcgacaagcttacgaactcgcggatcaccaaggtgcagagccagccttcctgttcggccttgaactgatcatatcaggattggagaagcagctgaaggccgatagtgggtct

SEQ ID NO: 1362 - DNA, 621 bp, Artificial Sequence
  synthetic construct; nucleotides encoding sulfonylurea responsive repressor
atggccagactcgacaagagcaaggtgatcaacagcgcactggagctgctgaacgaggtcggaatcgaaggcctcacaacccgtaagctcgcccagaagctcggggttgagcagcctacattgtactggcacgtcaagaacaagcgagctctgctagacgctatggccagagagatgctcgatcggcaccaaactcactacttacccttggaaggggaaagctggcaaaatttcttgaggaacaaggctaagtccatgagaaatgctttgctcagtcaccgtgatggagccaaggtctgtctaggtacgggcttcacggagcgacaatatgaaacttctgagaactggcttgccttcctgacacaacaaggtttctcccttgagaacgccctctacgcattccaagcagtggggatctacactctgggttgtgtcttgctggatcaagagctgcaagtcgctaaggaggagagggaaacacctactactgatagtatgccgccactggttcgacaagctattgaactcgcggatcaccaaggtgcagagccagccttcctgttcggccttgaactgatcatatcaggattggagaagcagctgaaggccgaaagtgggtct

SEQ ID NO: 1363 - DNA, 621 bp, Artificial Sequence
  synthetic construct; nucleotides encoding sulfonylurea responsive repressor
  misc_feature (190)..(190): n is a, c, g, or t
  misc_feature (299)..(299): n is a, c, g, or t
  misc_feature (322)..(322): n is a, c, g, or t
  misc_feature (337)..(338): n is a, c, g, or t
  misc_feature (348)..(348): n is a, c, g, or t
atggccagactcgacaagagcaaggtgatcaacagcgcactggagctgctgaacgaggtcggaatcgaaggcctcacaacccgtaagctcgcccagaagctcggggttgagcagcctacattgtactggcacgtcaagaacaagcgagctctgctagacgctatggccatagagatgctcgatcggcacnagattcactacttacccttggaaggggaaagctggcaaaatttcttgaggaacagggctaagtccatgagaaatgctttgctcagtcaccgtgatggagccaaggtctntctaggtacgggcttcacggagnaacaatatgaaactnntgagaactcncttgccttcctgacacaacaaggtttctcccttgagaacgccctctacgcaatgcaagcagtggggatctacactctgggttgtgtcttgctggatcaagagctgcaagtcgctaaggaggagagggaaacacctactactgatagtatgccgccactggttcgacaagctattgaactcgcggatcaccaaggtgcagagccagccttcctgttcggccttgaactgatcatatcaggattggagaagcagctgaaggccgaaagtgggtct

SEQ ID NO: 1364 - DNA, 621 bp, Artificial Sequence; identical to SEQ ID NO: 1343
  synthetic construct; nucleotides encoding sulfonylurea responsive repressor

SEQ ID NO: 1365 - DNA, 621 bp, Artificial Sequence
  synthetic construct; nucleotides encoding sulfonylurea responsive repressor
atggccagactcgacaagagcaaggtgatcaacagcgcactggagctgctgaacgaggtcggaatcgaaggcctcacaacccgtaagctcgcccagaagctcggggttgagcagcctacattgtactggcacgtcaagaacaagcgagctctgctagacgctatggccatagagatgctcgatcggcacaggattcactacttacccttggaaggggaaagctggcaagatttcttgaggaacaaggctaagtccatgagaaatgctttgctcagtcaccgtgatggagccaaggtctgtctaggtacgggcttcacggagcaacaatatgaaactcaagagaacaaccttgccttcctgacacaacaaggtttctcccttgagaacgccctctacgcaaatcaagcagtggggatctacactctgggttgtgtcttgctggatcaagagctgcaagtcgctaaggaggagagggaaacacctactactgatagtatgccgccactggttcgacaagctgttgaactcgcggatcaccaaggtgcagagccagccttcctgttcggccttgaactgatcatatcaggattggagaagcagctgaaggccgaaagtgggtct

SEQ ID NO: 1366 - DNA, 621 bp, Artificial Sequence
  synthetic construct; nucleotides encoding sulfonylurea responsive repressor
atggccagactcgacaagagcaaggtgatcaacagcgcactggagctgctgaacgaggtcggaatcgaaggcctcacaacccgtaagctcgcccagaagctcggggttgagcagcctacattgtactggcacgtcaagaacaagcgagctctgctagacgctatggccatagagatgctcgatcggcacaagattcactacttacccttggaaggggaaagctggcaaaatttcttgaggaacagggctaagtccatgagaaatgctttgctcagtcaccgtgatggagccaaggtctgtctaggtacgggcttcacggagcaacaatatgaaactcaagagaacaaccttgccttcctgacacaacaaggtttctcccttgagaacgccctctacgcaaatcaagcagtggggatctacactctgagttgtgtcttgctggatcaagagctgcaagtcgctaaggaggagagggaaacacctactactgatagtatgccgccactggttcgacaagcttttgaactcgcggatcaccaaggtgcagagccagccttcctgttcggccttgaactgatcatatcaggattggagaagcagctgaaggccgaaagtgggtct

SEQ ID NO: 1367 - DNA, 621 bp, Artificial Sequence
  synthetic construct; nucleotides encoding sulfonylurea responsive repressor
atggccagactcgacaagagcaaggtgatcaacagcgcactggagctgctgaacgaggtcggaatcgaaggcctcacaacccgtaagctcgcccagaagctcggggttgagcagcctacattgtactggcacgtcaagaacaagcgagctctgctagacgctatggccatagagatgctcgatcggcacaagattcactacttacccttggaaggggaaagctggcaagatttcttgaggaacaaggctaagtccatgagaaatgctttgctcagtcaccgtgatggagccaaggtctgtctaggtacgggcttcacggagcaacaatatgaaactcaagagaactcgcttgccttcctgacacaacaaggtttctcccttgagaacgccctctacgcaaatcaagcagtggggatctacactctgggttgtgtcttgctggatcaagagctgcaagtcgctaaggaggagagggaaacacctactactgatagtatgccgccactggttcgacaagcttacgaactcgcggatcaccaaggtgcagagccagccttcctgttcggccttgaactgatcatatcaggattggagaagcagctgaaggccgaaagtgggtct

SEQ ID NO: 1368 - DNA, 621 bp, Artificial Sequence
  synthetic construct; nucleotides encoding sulfonylurea responsive repressor
atggccagactcgacaagagcaaggtgatcaacagcgcactggagctgctgaacgaggtcggaatcgaaggcctcacaacccgtaagctcgcccagaagctcggggttgagcagcctacattgtactggcacgtcaagaacaagcgagctctgctagacgctatggccatagagatgctcgatcggcaccaaactcactacttacccttggaaggggaaagctggcaaaatttcttgaggaacagggctaagtccatgagaaatgctttgctcagtcaccgtgatggagccaaggtctgtctaggtacgggcttcacggagaaacaatatgaaactcaagagaactcgcttgccttcctgacacaacaaggtttctcccttgagaacgccctctacgcaaatcaagcagtggggatctacactctgggttgtgtcttgctggatcaagagctgcaagtcgctaaggaggagagggaaacacctactactgatagtatgccgccactggttcgacaagctattgaactcgcggatcaccaaggtgcagagccagccttcctgttcggccttgaactgatcatatcaggattggagaagcagctgaaggccgaaagtgggtct

SEQ ID NO: 1369 - DNA, 621 bp, Artificial Sequence
  synthetic construct; nucleotides encoding sulfonylurea responsive repressor
atggccagactcgacaagagcaaggtgatcaacagcgcactggagctgctgaacgaggtcggaatcgaaggcctcacaacccgtaagctcgcccagaagctcggggttgagcagcctacattgtactggcacgtcaagaacaagcgagctctgctagacgctatggccatagagatgctcgatcggcacacgactcactacttacccttggaaggggaaagctggcaaaatttcttgaggaactgggctaagtccatgagaaatgctttgctcagtcaccgtgatggagccaaggtctgtctaggtacgggcttcacggagcaacaatatgaaactatggagaactcgcttgccttcctgacacaacaaggtttctcccttgagaacgccctctacgcaatgcaagcagtggggatctacactctgggttgtgtcttgctggatcaagagctgcaagtcgctaaggaggagagggaaacacctactactgatagtatgccgccactggttcgacaagctgttgaactcgcggatcaccaaggtgcagagccagccttcctgttcggccttgaactgatcatatcaggattggagaagcagctgaaggccgaaagtgggtct

SEQ ID NO: 1370 - DNA, 621 bp, Artificial Sequence
  synthetic construct; nucleotides encoding sulfonylurea responsive repressor
atggccagactcgacaagagcaaggtgatcaacagcgcactggagctgctgaacgaggtcggaatcgaaggcctcacaacccgtaagctcgcccagaagctcggggttgagcagcctacattgtactggcacgtcaagaacaagcgagctctgctagacgctatggccatagagatgctcggtcggcacaagactcactacttacccttggaaggggaaagctggcaagatttcttgaggaactgggctaagtccatgagaaatgctttgctcagtcaccgtgatggagccaaggtctgtctaggtacgggcttcacggagcaacaatatgaaactatggagaacaaccttgacttcctgacacaacaaggtttctcccttgagaacgccctctacgcaatgcaagcagtggggatctacactctgggtcgtgtcttgctggatcaagagctgcaagtcgcgaaggaggagagggaaacacctactactgatagtatgccgccactggttcgacaagcttttgaactcttcgatcaccaaggtgcagagccagccttcctgttcggccttgaactgatcatatcaggattggagaagcagctgaaggccgaaagtgggtct

SEQ ID NO: 1371 - DNA, 621 bp, Artificial Sequence
  synthetic construct; nucleotides encoding sulfonylurea responsive repressor
atggccagactcgacaagagcaaggtgatcaacagcgcactggagctgctgaacgaggtcggaatcgaaggcctcacaacccgtaagctcgcccagaagctcggggttgagcagcctacattgtactggcacgtcaagaacaagcgagctctgctagacgctatggccatagagatgctcgatcggcaccaaattcactacttacccttggaaggggaaagctggcaaaatttcttgaggaacaaggctaagtccatgagaaatgctttgctcagtcaccgtgatggagccaaggtctgtctaggtacgggcttcacggagcaacaatatgaaactatggagaactcgcttgccttcctgacacaacaaggtttctcccttgagaacgccctctacgcattgcaagcagtggggatctacactctgggttgtgtgttgctggatcaggagctgcaagtcgctaaggaggagagggaaacacctactactgatagtatgccgccactggttcgacaagctattgaactcgcggatcaccaaggtgcagagccagccttcctgttcggccttgaactgatcatatcaggattggagaagcagctgaaggccgaaagtgggtct

SEQ ID NO: 1372 - DNA, 621 bp, Artificial Sequence
  synthetic construct; nucleotides encoding sulfonylurea responsive repressor
atggccagactcgacaagagcaaggtgatcaacagcgcactggagctgctgaacgaggtcggaatcgaaggcctcacaacccgtaagctcgcccagaagctcggggttgagcagcctacattgtactggcacgtcaagaacaagcgagctctgctagacgctatggccagagagatgctcgatcggcacaagactcactacttacccttggaaggggaaagctggcaaaatttcttgaggaactgggctaagtccatgagaaatgctttgctcagtcaccgtgatggagccaaggtctgtctaggtacgggcttcacggagcaacaatatgaaactgctgagaacaaccttgccttcctgacacaacaaggtttctcccttgagaaagccctctacgcattccaagcagtggggatctacactctgggttgtgtcttgctggatcaagagctgcaagtcgctaaggaggagagggaaacacctactactgatagtatgccgcctctggttcgacaagcttttgaactcttcgatcaccaaggtgcagagccagccttcctgttcggccttgaactgatcatatcaggattggagaagcagctgaaggccgaaagtgggtct

SEQ ID NO: 1373 - DNA, 621 bp, Artificial Sequence
  synthetic construct; nucleotides encoding sulfonylurea responsive repressor
atggccagactcgacaagagcaaggtgatcaacagcgcactggagctgctgaacgaggtcggaatcgaaggcctcacaacccgtaagctcgcccagaagctcggggttgagcagcctacattgtactggcacgtcaagaacaagcgagctctgctagacgctatggccatagagatgctcgatcggcacacgactcactacttacccttggaaggggaaagctggcaaaatttcttgaggaacagggctaagtccatgagaaatgctttgctcagtcaccgtgatggagccaaggtagcactaggtacgggcttcacggagaaacaatatgaaactcaagagaacaaccttgccttcctgacacaacaaggtttctcccttgagaacgccctctacgcaaatcaagcagtggggatctacactctgggttgtgtcttgctggatcaagagctgcaagtcgctaaggaggagagggaaacacctactactgatagtatgccgccactggttcgacaagctgttgaactcgcggatcaccaaggtgcagagccagccttcctgttcggccttgaactgatcatatcaggattggagaagcagctgaaggccgaaagtgggtct

SEQ ID NO: 1374 - DNA, 621 bp, Artificial Sequence
  synthetic construct; nucleotides encoding sulfonylurea responsive repressor
atggccagactcgacaagagcaaggtgatcaacagcgcactggagctgctgaacgaggtcggaatcgaaggcctcacaacccgtaagctcgcccagaagctcggggttgagcagcctacattgtactggcacgtcaagaacaagcgagctctgctagacgctatggccatagagatgctcgatcggcacaaaactcactacttacccttggaaggggaaagctggcaagatttcttgaggaacagggctaagtccatgagaaatgctttgctcagtcaccgtgatggagccaaggtctgtctaggtacgggcttcacggagagacaatatgaaactcaagagaacaaccttgccttcctgacacaacaaggtttctcccttgagaacgccctctacgcaaatcaagcagtggggatctacactctgggttgtgtcttgctggatcaagagctgcaagtcgctaaggaggagagggaaacacctactactgatagtatgccgccactggttcgacaagctattgaactcgcggatcaccaaggtgcagagccagccttcctgttcggccttgaactgatcatatcaggattggagaagcagctgaaggccgaaagtgggtct

SEQ ID NO: 1375 - DNA, 621 bp, Artificial Sequence
  synthetic construct; nucleotides encoding sulfonylurea responsive repressor
atggccagactcgacaagagcaaggtgatcaacagcgcactggagctgctgaacgaggtcggaatcgaaggcctcacaacccgtaagctcgcccagaagctcggggttgagcagcctacattgtactggcacgtcaagaacaagcgagctctgctagacgctatggccatagagatgctcgatcggcacaagactcactacttacccttggaaggggaaagctggcaagatttcttgaggaacaaggctaagtccatgagaattgctttgctcagtcaccgtgatggagccaaggtctgtctaggtacgggcttcacggagaaacaatatgaaactgctgagaacacgcttgccttcctgacacaacaaggtttctcccttgagaacgccctctacgcattccaagcagtggggatctacactctgggttgtgtcttgctggatcaagagctgcaagtcgctaaggaggagagggaaacacctactactgatagtatgccgccactggttcgacaagcttttgaactcgcggatcaccaaggtgcagagccagccttcctgttcggccttgaactgatcatatcaggattggagaagcagctgaaggccgaaagtgggtct

SEQ ID NO: 1376 - DNA, 621 bp, Artificial Sequence
  synthetic construct; nucleotides encoding sulfonylurea responsive repressor
atggccagactcgacaagagcaaggtgatcaacagcgcactggagctgctgaacgaggtcggaatcgaaggcctcacaacccgtaagctcgcccagaagctcggggttgagcagcctacattgtactggcacgtcaagaacaagcgagctctgctagacgctatggccatagagatgctcgatcggcacaggattcactacttacccttggaaggggaaagctggcaagatttcttgaggaactgggctaagtccatgagaaatgctttgctcagtcaccgtgatggagccaaggtctgtctaggtacgggcttcacggagcgacaatatgaaactcaagagaacaagcttgccttcctgacacaacaaggtttctcccttgagaacgccctctacgcaaatcaagcagtggggatctacactctgggttgtgtcttgctggatcaagagctgcaagtcgctaaggaggagagggaaacacctactactgatagtatgccgccactggttcgacaagctattgaactcgcggatcaccaaggtgcagagccagccttcctgttcggccttgaactgatcatatctggattggagaagcagctggaggccgaaagtgggtct

SEQ ID NO: 1377 - DNA, 622 bp, Artificial Sequence
  synthetic construct; nucleotides encoding sulfonylurea responsive repressor
atggccagactcgacaagagcaaggtgatcaacagcgcactggagctgctgaacgaggtcggaatcgaaggcctcacaacccgtaagctcgcccagaagctcggggttgagcagcctacattgtactggcacgtcaagaacaagcgagctctgctagacgctatggccatagagatgctcgatcggcacaggactcactacttacccttggaaggggaaagctggcaagatttcttgaggaactgggctaagtccatgagaaatgctttgctcagtcaccgtgatggagccaaggtctgtctaggtacgggcttcacggagcaacaatatgaaacttctgagaacaagcttgccttcctgacacaacaaggtttctcccttgagaacgccctctacgtattccaagcagtggggatctacactctgggttgtgccttgctggatcaagagctgcaagtcgctaaggaggagagggaaacacctactactgatagtatgccgccactggttcgacaagctgttgaactcttcgatcaccaaggtgcagagccagccttcctgttcggccttgaactgatcatatcaggattggagaagcagctgaaggccgaaagtgggtctg

SEQ ID NO: 1378 - DNA, 621 bp, Artificial Sequence
  synthetic construct; nucleotides encoding sulfonylurea responsive repressor
atggccagactcgacaagagcaaggtgatcaacagcgcactggagctgctgaacgaggtcggaatcgaaggcctcacaacccgtaagctcgcccagaagctcggggttgagcagcctacattgtactggcacgtcaagaacaagcgagctctgctagacgctatggccatagagatgctcgatccgcacaggattcactacttacccttggaaggggaaagctggcaaaatttcttgaggaactgggctaagtccatgagaaatgctttgctcagtcaccgtgatggagccaaggtctgtctaggtacgggcttcacggagcaacaatatgaaactatggagaactcgcttgccttcctgacacaacaaggtttctcccttgagaacgccctctacgcaatgcaagcagtggggatctacactctgggttgtgtcttgctggatcaagagctgcaagtcgctaaggaggagagggaaacacctactactgatagtatgccgccactggttcgacaagctgttgaactcgcggatcaccaaggtgcagagccagccttcctgttcggccttgaactgatcatatcaggattggagaagcagctgaaggccgaaagtgggtct

SEQ ID NO: 1379 - DNA, 621 bp, Artificial Sequence
  synthetic construct; nucleotides encoding sulfonylurea responsive repressor
atggccagactcgacaagagcaaggtgatcaacagcgcactggagctgctgaacgaggtcggaatcgaaggcctcacaacccgtaagctcgcccagaagctcggggttgagcagcctacattgtactggcacgtcaagaacaagcgagctctgctagacgctatggccatagagatgctcgatcggcaccaaactcactacttacccttggaaggggaaagctggcaagatttcttgaggaacaatgctaagtccatgagaaatgctttgctcagtcaccgtgatggagccaaggtcgcactaggtacgggcttcacggagagacaatatgaaactcaagagaacaagcttgccttcctgacacaacaaggtttctcccttgagaacgccctctacgcaaatcaagcagtggggatctacactctgggttgtgtcttgctggatcaagagctgcaagtcgctaaggaggagagggaaacacctactactgatagtatgccgccactggttcgacaagctgttgaactcgcggatcaccaaggtgcagagccagccttcctgttcggccttgaactgatcatatcaggattggagaagcagctgaaggccgaaagtgggtct

SEQ ID NO: 1380 - DNA, 621 bp, Artificial Sequence
  synthetic construct; nucleotides encoding sulfonylurea responsive repressor
atggccagactcgacaagagcaaggtgatcaacagcgcactggagctgctgaacgaggtcggaatcgaaggcctcacaacccgtaagctcgcccagaagctcggggttgagcagcctacattgtactggcacgtcaagaacaagcgagctctgctagacgctatggccatagagatgctcgatcggcacaagattcactacttacccttggaaggggaaagctggcaagatttcttgaggaacaaggctaagtccatgagaaatgctttgctcagtcaccgtgatggagccaaggtctgtctaggtacgggcttcacggagcaacaatatgaaactcaagagaacaaccttgccttcctgacacaacaaggtttctcccttgagaacgccctctacgcaatgcaagcagtggggatctacactctgggttatgtcttgctagatcaagagctgcaagtcgctaaggaggagagggaaacacctactactgatagtatgccgccactggttcgacaagctattgaactcgcggatcaccaaggtgcagagccagccttcctgttcggccttgaactgatcatatcaggattggagaagcagctgaaggccgaaagtgagtct

SEQ ID NO: 1381 - protein, 207 aa, Artificial Sequence
  synthetic construct; Sulfonylurea responsive repressor
MARLDKSKVINSALELLNEVGIEGLTTRKLAQKLGVEQPTLYWHVKNKRALLDAMAIEMLDRHATHYCPLEGESWQDFLRNKAKSMRNALLSHRDGAKVCLGTGFTEQQYETAENSLAFLCQQGFSLENALYAMQAVGIYTLGCVLLDQELQVAKEERETPTTDSMPPLVRQALELKDHQGAEPAFLFGLELIIAGLEKQLKAESGS

SEQ ID NO: 1382 - protein, 207 aa, Artificial Sequence
  synthetic construct; Sulfonylurea responsive repressor
MARLDKSKVINSALELLNEVGIEGLTTRKLAQKLGVEQPTLYWHVKNKRALLDAMAIEMLDRHATHYCPLEGESWQDFLRNKAKSMRCALLSHRDGAKVCLGTGFTEQQYETAENSLAFLCQQGFSLENALYAMQAVGIYTLGCVLLDQELQVAKEERETPTTDSMPPLVRQALELKDHQGAEPAFLFGLELIISGLEKQLKAESGS

SEQ ID NO: 1383 - protein, 207 aa, Artificial Sequence
  synthetic construct; Sulfonylurea responsive repressor
MARLDKSKVINSALELLNEVGIEGLTTRKLAQKLGVEQPTLYWHVKNKRALLDAMAIEMLDRHATHYLPLEGASWQDFLRNKAKSMRNALLSHRDGAKVCLGTGFTEQQYETAENSLAFLCQQGFSLENALYAMQAVGIYTLGCVLLDQELQVAKEERETPTTDSMPPLVRQALELKDHQGAEPAFLFGLELIIAGLEKQLKSESGS

SEQ ID NO: 1384 - protein, 207 aa, Artificial Sequence
  synthetic construct; Sulfonylurea responsive repressor
MARLDKSKVINSALELLNEVGIEGLTTRKLAQKLGVEQPTLYWHVKNKRALLDAMAIEMLDPHAIHLLPLEGASWQDFLRNNAKSMRRALLSHRDGAKVCLGTGFTEQQYETAENSLAFLCQQGFSLENALYAMQAVGIYTLGCVLLDQELQVAKEERETPTTDSMPPLVRQALELKDHQGAEPAFLFGLELIICGLEKQLKAESGS

SEQ ID NO: 1385 - protein, 207 aa, Artificial Sequence
  synthetic construct; Sulfonylurea responsive repressor
MARLDKSKVINSALELLNEVGIEGLTTRKLAQKLGVEQPTLYWHVKNKRALLDAMAIEMLDRHATHYLPLEGESWQDFLRNKAKSMRCALLSHRDGAKVCLGTGFTEQQYETAENSLAFLTQQGFSLENALYAMQAVGIYTLGCVLLDQELQVAKEERETPTTDSMPPLVRQALELKDHQGAELAFLFGLELIIRGLEKQLKCESGS

SEQ ID NO: 1386 - protein, 207 aa, Artificial Sequence
  synthetic construct; Sulfonylurea responsive repressor
MARLDKSKVINSALELLNEVGIEGLTTRKLAQKLGVEQPTLYWHVKNKRALLDAMAIEMLDPHATHFCLLEGESWQDFLRNNAKSMRNALLSHRDGAKVCLGTGFTEQQYETAENSLAFLCQQGFSLENALYAMQAVGIYTLGCVLLDQELQVAKEERETPTTDSMPPLVRQALELKDHQGAEPAFLFGLELIISGLEKQLKCESGS

SEQ ID NO: 1387 - protein, 207 aa, Artificial Sequence
  synthetic construct; Sulfonylurea responsive repressor
MARLDKSKVINSALELLNEVGIEGLTTRKLAQKLGVEQPTLYWHVKNKRALLDAMAIEMLDRHATHYSPLEGESWQDFLRNKAKSMRCALLSHRDGAKVCLGTGFTEQQYETAENSLAFLTQQGFSLENALYAMQAVGIYTLGCVLLDQELQVAKEERETPTTDSMPPLVRQALELKDHQGAEPAFLFGLELIIAGLEKQLKAESGS

SEQ ID NO: 1388 - protein, 207 aa, Artificial Sequence
  synthetic construct; Sulfonylurea responsive repressor
MARLDKSKVINSALELLNEVGIEGLTTRKLAQKLGVEQPTLYWHVKNKRALLDAMAIEMLDPHAPHLLPLEGASWQDFLRNNAKSMRCALLSHRDGAKVCLGTGFTEQQYETAENSLAFLTQQGFSLENALYAMQAVGIYTLGCALLDQELQVAKEERETPTTDSMPPLVRQALELKDHQGAEPAFLFGLELIISGLEKQLKRESGS

SEQ ID NO: 1389 - protein, 207 aa, Artificial Sequence; identical to SEQ ID NO: 407
  synthetic construct; Sulfonylurea responsive repressor

SEQ ID NO: 1390 - protein, 207 aa, Artificial Sequence
  synthetic construct; Sulfonylurea responsive repressor
MARLDKSKVINSALELLNEVGIEGLTTRKLAQKLGVEQPTLYWHVKNKRALLDAMAIEMLDRHATHYLPLEGASWQDFLRNKAKSMRRALLSHRDGAKVCLGTGFTEQQYETAENSLAFLTQQGFSLENALYAMQAVGIYTLGCVLLNQELQVAKEERETPTTDSMPPLVRQALELKDHQGAEPAFLFGLELIIAGLEKQLKAESGS

SEQ ID NO: 1391 - protein, 207 aa, Artificial Sequence
  synthetic construct; Sulfonylurea responsive repressor
MARLDKSKVINSALELLNEVGIEGLTTRKLAQKLGVEQPTLYWHVKNKRALLDAMAIEMLDRHATHYCPLEGESWQDFLRNKAKSMRNALLSHRDGAKVCLGTGFTEQQYETAENSLAFLTQQGFSLENALYAMQAVGIYTLGCVLLDQELQVAKEERETPTTDSMPPLVRQALELKDHQGAEPAFLFGLELIIAGLEKQLKAESGS

SEQ ID NO: 1392 - protein, 207 aa, Artificial Sequence; identical to SEQ ID NO: 404
  synthetic construct; Sulfonylurea responsive repressor

SEQ ID NO: 1393 - protein, 207 aa, Artificial Sequence
  synthetic construct; Sulfonylurea responsive repressor
MARLDKSKVINSALELLNEVGIEGLTTRKLAQKLGVEQPTLYWHVKNKRALLDAMAIEMLDPHATHYSPLEGESWQDFLRNKAKSMRCALLSHRDGAKVCLGTGFTEQQYETAENSLAFLCQQGFSLENALYAMQAVGIYTLGSALLDQELQVAKEERETPTTDSMPPLVRQALNLKDHQGAEPAFLFGLELIIRGLEKQLKCESGS

SEQ ID NO: 1394 - protein, 207 aa, Artificial Sequence
  synthetic construct; Sulfonylurea responsive repressor
MARLDKSKVINSALELLNEVGIEGLTTRKLAQKLGVEQPTLYWHVKNKRALLDAMAIEMLDRHATHYSPLERESWQNFLRNNAKSMRNALLSHRDGAKVCLGTGFTEQQYETAENSLAFLTQQGFSLENALYAMQAVGIYTLGCVLLDQELQVAKEERETPTTDSMPPLVRQAVELKDHQGAEPAFLFGLELIIAGLEKQLKCESGS

SEQ ID NO: 1395 - protein, 207 aa, Artificial Sequence
  synthetic construct; Sulfonylurea responsive repressor
MARLDKSKVINSALELLNEVGIEGLTTRKLAQKLGVEQPTLYWHVKNKRALLDAMAIEMLNRHATQYCPLEGESWQNFLRNNAKSMRCALLSHRDGAKVCLGTGFTEQQYETAENSLAFLTQQGFSLENALYAMQAVGIYTLGCVLLDQELQVAKEERETPTTDSMPPLVRQAVELKDHQGAEPAFLFGLELIISGLEKQLKRESGS

SEQ ID NO: 1396 - protein, 208 aa, Artificial Sequence
  synthetic construct; Sulfonylurea responsive repressor
MGSRLDKSKVINSALELLNEVGIEGLTTRKLAQKLGVEQPTLYWHVKNKRALLDAMAFEMLDRHAIHYLPLEGESWQNFLRNNAKSMRNALLSHRDGAKVCLGTGFTEQQYETAENRLAFLTQHGFSLEQALYAWQAVGIYTLGCVLLDQQLQVAKEERETPTTDSMPPLVRQAWELKDHQGAEPAFLFGLELIISGLEKQLKAESGS

SEQ ID NO: 1397 - protein, 208 aa, Artificial Sequence
  synthetic construct; Sulfonylurea responsive repressor
MGSRLDKSKVINSALELLNEVGIEGLTTRKLAQKLGVEQPTLYWHVKNKRALLDAMAFEMLDRHAIHYLPLEGESWQNFLRNNAKSMRNALLSHRDGAKVSLGTGFTEQQYETAEKRLAFLTQQGFSLENALYAWQAVGIYTLGCVLLDQELQVAKEERETPTTDSMPPLVRQAWELKDHQGAEPAFLFGLELIISGLEKQLKAESGS

SEQ ID NO: 1398 - protein, 208 aa, Artificial Sequence
  synthetic construct; Sulfonylurea responsive repressor
MGSRLDKSKVINSALELLNEVGIEGLTTRKLAQKLGVEQPTLYWHVKNKRALLDAMAIEMLDRHAIHYLPLEGASWQNFLRNNAKSMRNALLSHRDGAKVCLGTGFTEQQYETAENCLAFLTQQGFSLENALYAWQAVGIYTLGCVLLDQELQVAKEERETPTTDSMPPLVRQAWALKDHQGAEPAFLFGLELIISGLEKQLKAESGS

SEQ ID NO: 1399 - protein, 208 aa, Artificial Sequence
  synthetic construct; Sulfonylurea responsive repressor
MGSRLDKSKVINSALELLNEVGIEGLTTRKLAQKLGVEQPTLYWHVKNKRALLDAMAFEMLDRHAIHFLPLEGASWQNFLRNTAKSMRNALLSHRDGAKVCLGTGFTERQYETAENRLAFLTQQGFSLEQALYAWQAVGIYTLGCVLLDQELQVAKEERETPTTDSMPPLVRQAWELKDHQGAEPAFLFGLELIISGLEKQLKAESGS

SEQ ID NO: 1400 - protein, 208 aa, Artificial Sequence
  synthetic construct; Sulfonylurea responsive repressor
MGSRLDKSKVINSALELLNEVGIEGLTTRKLAQKLGVEQPTLYWHVKNKRALLDAMAFEMLDPHAIHYLPLEGESWQNFLRNHAKSMRNALLSHRDGAKVCLGTGFTEQQYETAENRLAFLTQQGFSLENALYAWQAVGIYTLGCVLLDQELQVAKEERETPTTDSMPPLVRQAWELKDHQGAEPAFLFGLELIISGLEKQLKAESGS

SEQ ID NO: 1401 - protein, 208 aa, Artificial Sequence
  synthetic construct; Sulfonylurea responsive repressor
MGSRLDKSKVINSALELLNEVGIEGLTTRKLAQKLGVEQPTLYWHVKNKRALLDAMAIEMLDRHAIHYLPLEGASWQNFLRNNAKSMRNALLSHRDGAKVCLGTGFTEQQYETAENRLAFLTQQGFSLEQALYAWQAVGIYTLGCVLLDQELQVAKEERETPTNDSMPPLVRQAWELKDHQGAEPAFLFGLELIISGLEKQLKAESGS

SEQ ID NO: 1402 - protein, 208 aa, Artificial Sequence
  synthetic construct; Sulfonylurea responsive repressor
MGSRLDKSKVINSALELLNEVGIEGLTTRKLAQKLGVEQPTLYWHVKNKRALLDAMAFEMLDRHAPHFLLLEGASWQNFLRNKAKSMRNALLSHRDGAKVCLGTGFTEKQYETAENSLAFLTQQGFSLENALYAWQAVGIYTLGCVLLDQELQVAKEERETPTTDSMPPLVRQAWELKDHQGAEPAFLFGLELIISGLEKQLKAESGS

SEQ ID NO: 1403 - protein, 208 aa, Artificial Sequence
  synthetic construct; Sulfonylurea responsive repressor
MGSRLDKSKVINSALELLNEVGIEGLTTRKLAQKLGVEQPTLYWHVKNKRALLDAMAFEMLNRHAIHYLPLEGESWQNFLRNNAKSMRNALLSHRDGAKVCLGTGFTEQQYETAENRLAFLTQQGFSLEQALYAWQAVGIYTLGCALLDQELQVAKEERETPTTDSMPPLVRQAWELKDHQGAEPAFLFGLELIISGLEKQLKAESGS

SEQ ID NO: 1404 - protein, 208 aa, Artificial Sequence
  synthetic construct; Sulfonylurea responsive repressor
MGSRLDKSKVINSALELLNEVGIEGLTTRKLAQKLGVEQPTLYWHVKNKRALLDAMAIEMLDRHAIHFLSLEGESWQNFLRNKAMSMRNALLSNRDGAKVCLGTGFTEQQYETAENSLAFLTQQGFSLENALYAWQAVGIYTLGCVLLDQELHVAKEERETPTTDSMPPLVRQAWELKDHQGAEPAFLFGLELIISGLEKQLKAESGS

SEQ ID NO: 1405 - protein, 207 aa, Artificial Sequence
  synthetic construct; Sulfonylurea responsive repressor
MGSRLDKSKVINSALELLNEVGIEGLTTRKLAQKLGVEQPTLYWHVKNKRALLDAMAIEMLDRHATHYLPLEGASWQNFLRNNAKSMRNALLSHRDGAKVCLGTGFTEQQYETAENRLAFLTQQGFSLEQALYAWQAVGIYTLGCVLLDQELQVAKEERETPTDSMPPLVRQAWELKDHQGAEPAFLFGLELIISGLEKQLKAESGS

SEQ ID NO: 1406 - protein, 208 aa, Artificial Sequence
  synthetic construct; Sulfonylurea responsive repressor
MGSRLDKSKVINSALELLNEVGIEGLTTRKLAQKLGVEQPTLYWHVKNKRALLDAMAFEMLDRHAPHYLPLEGASWQNFLRNNAKSMRNALLSHRDGAKVCLGTGFTEQQYETAENHLAFLTQQGFSLENALYAWQAVGIYTLGCVLLDQQLQVAKEERETPTTDSMPPLVRQAWELKDHQGAEPAFLFGLELIISGLEKQLKAESGS

SEQ ID NO: 1407 - protein, 207 aa, Artificial Sequence
  synthetic construct; Sulfonylurea responsive repressor
  misc_feature (202)..(202): Xaa can be any naturally occurring amino acid
MGSRLDKSKVINSALELLNEVGIEGLTTRKLAQKLGVEQPTLYWHVKNKRALLDAMAIEMLDRHATHYLPLEGESWQNFLRNNAKSMRNALLSHRDGAKVCLGTGFTEQQYETAENRLAFLTQQGFSLENALYAWQAVGIYTLGCVLLDQELQVAKEERETPTTDSMPPLVRQAWELKDHQGAEPAFLFGLELIISGLEKSXRRKWV

SEQ ID NO: 1408 - protein, 207 aa, Artificial Sequence
  synthetic construct; Sulfonylurea responsive repressor
MARLDKSKVINSALELLNEVGIEGLTTRKLAQKLGVEQPTLYWHVKNKRALLDAMAIEMLDRHAIHYLPLEGASWQNFLRNNAKSMRNALLSHRDGAKVCLGTGFTEQQYETAENSLAFLTQQGFSLEQALYAWQAVGIYTLGCVLLDQELQFAKEERETPTTDSMPPLVRQAVELKDHQGAEPAFLFGLELIISGLEKQLKAESGS

SEQ ID NO: 1409 - protein, 207 aa, Artificial Sequence
  synthetic construct; Sulfonylurea responsive repressor
MARLDKSKVINSALELLNEVGIEGLTTRKLAQKLGVEQPTLYWHVKNKRALLDAMAIEMLDRHAIHYLPLEGESWQNFLRNNAKSMRNALLSHRDGAKVCLGTGFTEQQYETAENRLAFLTQQGFSLEKALYAWQAVGIYTLGCVLLDQELQVAKEERETPTTDSMPPLVRQAWELKDHQGAEPAFLFGLELIISGLEKQLKAESGS

SEQ ID NO: 1410 - protein, 207 aa, Artificial Sequence
  synthetic construct; Sulfonylurea responsive repressor
MARLDKSKVINSALELLNEVGIEGLTTRKLAQKLGVEQPTLYWHVKNKRALLDAMAIEMLDRHAIHYLPLEGESWQNFLRNNAKSMRNALLSHRDGAKVCLGTGFTEQQYETAENRLAFLTQQGFSLENALYAWQAVGIYTLGCVLLDQELQVAKEERETPTTDSMPPLVRQAWELKDHQGAEPAFLFGLELIISGLEKQLKAESGS

SEQ ID NO: 1411 - protein, 207 aa, Artificial Sequence; identical to SEQ ID NO: 1410
  synthetic construct; Sulfonylurea responsive repressor

SEQ ID NO: 1412 - protein, 207 aa, Artificial Sequence; identical to SEQ ID NO: 1410
  synthetic construct; Sulfonylurea responsive repressor

SEQ ID NO: 1413 - protein, 207 aa, Artificial Sequence
  synthetic construct; Sulfonylurea responsive repressor
MARLDKSKVINSALELLNEVGIEGLTTRKLAQKLGVEQPTLYWHVKNKRALLDAMAFEMLDRHATHYLPLEGESWQNFLRNNAKSMRNALLSHRDGAKVCLGTGFTERQYETAENRLAFLTQQGFSLENALYAWQAVGIYTLGCVLLDQELQVAKEERETPTTDSMPPLVRQAWELKDHQGAEPAFLFGLELIISGLEKQLKAESGS

SEQ ID NO: 1414 - protein, 207 aa, Artificial Sequence
  synthetic construct; Sulfonylurea responsive repressor
MARLDKSKVINSALELLNEVGIEGLTTRKLAQKLGVEQPTLYWHVKNKRALLDAMAFEMLDRHAIHYLPLEGASWQNFLRNNAKSMRNALLSHRDGAKLCLGTGFTEQQYETAENRLAFLTQQGFSLEQALYAWQAVGIYTLGCVLLDQELQVAKEERETPTTDSMPPLVRQAWELKDHQGAEPAFLFGLELIISGLEKQLKAESGS

SEQ ID NO: 1415 - protein, 207 aa, Artificial Sequence; identical to SEQ ID NO: 1410
  synthetic construct; Sulfonylurea responsive repressor

SEQ ID NO: 1416 - protein, 207 aa, Artificial Sequence
  synthetic construct; Sulfonylurea responsive repressor
MARLDKSKVINSALELLNEVGIEGLTTRKLAQKLGVEQPTLYWHVKNKRALLDAMAIEMLDRHAIHYLPLEGESWQNFLRNNAKSMRNALLSHRDGAKVCLGTGFTEQQYETAENRLAFLTQQGFSLEQALYAWQAVGIYTLGCVLLDQELQVAKEERETPTTDSMPPLVRQAWELKDHQGSEPAFLFGLELIISGLEKQLKAESGY

SEQ ID NO: 1417 - protein, 207 aa, Artificial Sequence
  synthetic construct; Sulfonylurea responsive repressor
MARLDKSKVINSALELLNEVGIEGLTTRKLAQKLGVEQPTLYWHVKNKRALLDAMAIEMLDRHAIHYLPLEGESWQNFLRNNAKSMRNALLSHRDGAKVCLGTGFTEQQYETAENRLAFLTQQGFSLENALYAWQAVGIYTLGCVLLDQELQVAKEERETPTTDSMPPLVRQALELKDHQGAEPAFLFGLELIISGLEKQLKAESGS

SEQ ID NO: 1418 - protein, 206 aa, Artificial Sequence
  synthetic construct; Sulfonylurea responsive repressor
MARLDKSKVINSALELLNEVGIEGLTTRKLAQKLGVEQPTLYWHVKNKRALLDAMAIEMLDRHAIHYLPLEGESWQNFLRNNAKSMRNALLSHRDGAKVCLGTGFTEQQYETAENRLAFLTQQGFSLEQALYAWQAVGIYTLGCVLLDQELQVAKEERETPTTDSMPPLVRQAWELKDHQGAEPAFLFGLELIISGLEKLKAESGS

SEQ ID NO: 1419 - protein, 207 aa, Artificial Sequence
  synthetic construct; Sulfonylurea responsive repressor
MARLDKSKVINSALELLNEVGIEGLTTRKLAQKLGVEQPTLYWHVKNKRALLDAMAIEMLDRHATHFLPLEGESWQNFLRNNAKSMRNALLSHRDGAKVCLGTGFTKQQYETAENRLAFLTQQGFSLEQALYAWQAVGIYTLGCVLLDQELQVAKEERETPTTDSMPPLVRQAWELKDHQGAEPAFLFGLELIISGLEKQLKAESGS

SEQ ID NO: 1420 - protein, 208 aa, Artificial Sequence
  synthetic construct; Sulfonylurea responsive repressor
MGSRLDKSKVINSALELLNEVGIEGLTTRKLAQKLGVEQPTLYWHVKNKRALLDAMAIEMLDRHKTHYLPLEGESWQDFLRNRAKSMRNALLSHRDGAKVALGTGFTEQQYETMENSLAFLTQQGFSLENALYAFQAVGIYTLGCVLLDQELQVAKEERETPTTDSMPPLVRQAYELRDHQGAEPAFLFGLELIISGLEKQLKAESGS

SEQ ID NO: 1421 - protein, 208 aa, Artificial Sequence
  synthetic construct; Sulfonylurea responsive repressor
MGSRLDKSKVINSALELLNEVGIEGLTTRKLAQKLGVEQPTLYWHVKNKRALLDAMAIEMFDRHKTHYLPLEGESWQDFLRNNAKSRRNALLSHRDGAKVALGTGFTEQQYETMENCLAFLTQQGFSLENALYAFQAVGIYTLGCVLLDQELQVAKEERETPTTDSMPPLVRQAYELKDHQGAEPAFLFGLELIICGLEKQLKCESGS

SEQ ID NO: 1422 - protein, 208 aa, Artificial Sequence
  synthetic construct; Sulfonylurea responsive repressor
MGSRLDKSKVINSALELLNEVGIEGLTTRKLAQKLGVEQPTLYWHVKNKRALLDAMAIEMLDRHDTHYLPLEGESWQDFLRNNAKSRRNALLSHRDGAKVALGTGFTEQQYETMENSLAFLTQQGFSLENALYAMQAVGIYTLGCVLLDQELQVAKEERETPTTDSMPPLVRQAYELKDHQGAEPAFLFGLELIICGLEKQLKCESGS

SEQ ID NO: 1423 - protein, 208 aa, Artificial Sequence
  synthetic construct; Sulfonylurea responsive repressor
MGSRLDKSKVINSALELLNEVGIEGLTTRKLAQKLGVEQPTLYWHVKNKRALLDAMAIEMFDRHATHYLPLEGESWQDFLRNRAKSRRNALLSHRDGAKVALGTGFTEQQYETAENWLAFLTQQGFSLENALYAMQAVGIYTLGCVLLDQELQVAKEERETPTTDSMPPLVRQAYELKDHQGAEPAFLFGLELIICGLEKQLKCESGS

SEQ ID NO: 1424 - protein, 208 aa, Artificial Sequence
  synthetic construct; Sulfonylurea responsive repressor
  MISC_FEATURE (117)..(117): Xaa = Any Amino Acid
MGSRLDKSKVINSALELLNEVGIEGLTTRKLAQKLGVEQPTLYWHVKNKRALLDAMAIEMLDRHKTHYCPLEGESWQDFLRNRAKSRRNALLSHRDGAKVCLGTGFTEQQYETAENXLAFLTQQGFSLENALYAMQAVGIYTLGCVLLDQELQVAKEERETPTTDSMPPLVRQALELHDHQGAEPAFLFGLELIICGLEKQLKAESGS

SEQ ID NO: 1425 - protein, 208 aa, Artificial Sequence
  synthetic construct; Sulfonylurea responsive repressor
MGSRLDKSKVINSALELLNEVGIEGLTTRKLAQKLGVEQPTLYWHVKNKRALLDAMAIEMLDRHATHYLPLEGESWQDFLRNKAKSMRNALLSHRDGAKVALGTGFTEQQYETAENSLAFLTQQGFSLENALYAMQAVGIYTLGCVLLDQELQVAKEERETPTTDSMPPLVRQALELHDHQGAEPAFLFGLELIISGLEKQLKAESGS

SEQ ID NO: 1426 - protein, 208 aa, Artificial Sequence
  synthetic construct; Sulfonylurea responsive repressor
MGSRLDKSKVINSALELLNEVGIEGLTTRKLAQKLGVEQPTLYWHVKNKRALLDAMAIEMFDRHATHYLPLEGESWQDFLRNRAKSMRNALLSHRDGAKVALGTGFTEQQYETAENSLAFLTQQGFSLENALYAFQAVGIYTLGCVLLDQELQVAKEERETPTTDSMPPLVRQALELHDHQGAEPAFLFGLELIISGLEKQLKCESGS

SEQ ID NO: 1427 - protein, 208 aa, Artificial Sequence
  synthetic construct; Sulfonylurea responsive repressor
MGSRLDKSKVINSALELLNEVGIEGLTTRKLAQKLGVEQPTLYWHVKNKRALLDAMAIEMLDRHATHYLPLEGESWQDFLRNRAKSMRNALLSHRDGAKVALGTGFTEQQYETMENSLAFLTQQGFSLENALYAMQAVGIYTLGCVLLDQELQVAKEERETPTTDSMPPLVRQAYELRDHQGAEPAFLFGLELIISGLEKQLKCESGS

SEQ ID NO: 1428 - protein, 208 aa, Artificial Sequence
  synthetic construct; Sulfonylurea responsive repressor
MGSRLDKSKVINSALELLNEVGIEGLTTRKLAQKLGVEQPTLYWHVKNKRALLDAMAIEMLDRHATHYCPLEGESWQDFLRNKAKSMRNALLSHRDGAKVALGTGFTEQQYETMENSLAFLTQQGFSLENALYAFQAVGIYTLGCVLLDQELQVAKEERETPTTDSMPPLVRQAYELKDHQGAEPAFLFGLELIICGLEKQLKAESGS

SEQ ID NO: 1429 - protein, 208 aa, Artificial Sequence
  synthetic construct; Sulfonylurea responsive repressor
MGSRLDKSKVINSALELLNEVGIEGLTTRKLAQKLGVEQPTLYWHVKNKRALLDAMAIEMFDRHDTHYCPLEGESCQDFLRNKAKSMRNALLSHRDGAKVALGTGFTEQQYETAENSLAFLTQQGFSLENALYAFQAVGIYTLGCVLLDQELQVAKEERETPTTDSMPPLVRQAIELHDHQGAEPAFLFGLELIISGLEKQLKCESGS

SEQ ID NO: 1430 - protein, 208 aa, Artificial Sequence
  synthetic construct; Sulfonylurea responsive repressor
MGSRLDKSKVINSALELLNEVGIEGLTTRKLAQKLGVEQPTLYWHVKNKRALLDAMAIEMLDRHATHYCPLEGESWQDFLRNKAKSMRNALLSHRDGAKVALGTGFTEQQYETMENSLAFLTQQGFSLENALYAMQAVGIYTLGCVLLDQELQVAKEERETPTTDSMPPLVRQAYELKDHQGAEPAFLFGFELIICGLEKQLKCESGS

SEQ ID NO: 1431 - protein, 208 aa, Artificial Sequence
  synthetic construct; Sulfonylurea responsive repressor
MGSRLDKSKVINSALELLNEVGIEGLTTRKLAQKLGVEQPTLYWHVKNKRALLDAMAIEMFDRHDTHYCPLEGESWQDFLRNNAKSRRNALLSHRDGAKVALGTGFTEQQYETMENSLAFLTQQGFSLENALYAFQAVGIYTLGCVLLDQELQVAKEERETPTTDSMPPLVRQAYQLKDHQGAEPAFLFGLELIICGLEKQLKAESGS

SEQ ID NO: 1432 - protein, 207 aa, Artificial Sequence
  synthetic construct; Sulfonylurea responsive repressor
MGSRLDKSKVINSALELLNEVGIEGLTTRKLAQKLGVEQPTLYWHVKNKRALLDAMAIEMLDRHKTHYCPLEGESWQDFLRNKAKSMRNALLSHRDGAKVALGTGFTEQQYETAENCLAFLTQQGFSLENALYAFQAVGIYTLGCVLLDQELQVAKEERETPTTDSMPPLVRQAFELKDHQGAEPAFLFGLELIICGLEKQLCESGS

SEQ ID NO: 1433 - protein, 208 aa, Artificial Sequence
  synthetic construct; Sulfonylurea responsive repressor
MGSRLDKSKVINSALELLNEVGIEGLTTRKLAQKLGVEQPTLYWHVKNKRALLDAMAIEMLDRHKTHYLPLEGESWQDFLRNKAKSMRNALLSHRDGAKVALGTGFTEQQYETAENSLAFLTQQGFSLENALYAFQAVGIYTLGCVLLDQELQVAKEERETPTTDSMPPLVRQALELHDHQGAEPAFLFGLELIISGLEKQLKAESGS

SEQ ID NO: 1434 - protein, 208 aa, Artificial Sequence
  synthetic construct; Sulfonylurea responsive repressor
MGSRLDKSKVINSALELLNEVGIEGLTTRKLAQKLGVEQPTLYWHVKNKRALLDAMAIEMLDRHDTHYCPLEGESWQDFLRNKAKSMRNALLSHRDGAKVALGTGFTEQQYETAENCLAFLTQQGFSLENALYAFQAVGIYTLGCVLLDQELQVAKEERETPTTDSMPPLVRQAIELHDHQGAEPAFLFGLELIISGLEKQLKCESGS

SEQ ID NO: 1435 - protein, 208 aa, Artificial Sequence
  synthetic construct; Sulfonylurea responsive repressor
MGSRLDKSKVINSALELLNEVGIEGLTTRKLAQKLGVEQPTLYWHVKNKRALLDAMAIEMFDRHKTHYCPLEGESWQDFLRNRAKSMRNALLSHRDGAKVALGTGFTEQQYETMENSLAFLTQQGFSLENALYAMQAVGIYTLGCVLLDQELQVAKEERETPTTDSMPPLVRQAYELKDHQGAEPAFLFGLELIICGLEKQLKAESGS

SEQ ID NO: 1436 - protein, 208 aa, Artificial Sequence
  synthetic construct; Sulfonylurea responsive repressor
MGSRLDKSKVINSALELLNEVGIEGLTTRKLAQKLGVEQPTLYWHVKNKRALLDAMAIEMFDRHATHYLPLEGESWQDFLRNRAKSMRNALLSHRDGAKVALGTGFTEQQYETMENSLAFLTQQGFSLENALYAMQAVGIYTLGCVLLDQELQVAKEERETPTTDSMPPLVRQAIELHDHQGAEPAFLFGLELIISGLEKQLKAESGS

SEQ ID NO: 1437 - protein, 208 aa, Artificial Sequence
  synthetic construct; Sulfonylurea responsive repressor
MGSRLDKSKVINSALELLNEVGIEGLTTRKLAQKLGVEQPTLYWHVKNKRALLDAMAIEMFDRHKTHYLPLEGESWQDFLRNNAKSRRNALLSHRDGAKVALGTGFTEQQYETMENSLAFLTQQGFSLENALYAMQAVGIYTLGCVLLDQELQVAKEERETPTTDSMPPLVRQAYELKDHQGAEPAFLFGLELIICGLEKQLKCESGS

SEQ ID NO: 1438 - protein, 208 aa, Artificial Sequence
  synthetic construct; Sulfonylurea responsive repressor
MGSRLDKSKVINSALELLNEVGIEGLTTRKLAQKLGVEQPTLYWHVKNKRALLDAMAIEMFDRHATHYLPLEGESWQDFLRNNAKSRRNALLSHRDGAKVALGTGFTEQQYETMENSLAFLTQQGFSLENALYAFQAVGIYTLGCVLLDQELQVAKEERETPTTDSMPPLVRQAYELKDHQGAEPAFLFGLELIICGLEKQLKCESGS

SEQ ID NO: 1439 - protein, 207 aa, Artificial Sequence
  synthetic construct; Sulfonylurea responsive repressor
MGSRLDKSKVINSALELLNEVGIEGLTTRKLAQKLGVEQPTLYWHVKNKRALLDAMAIEMFDRHDTHYLPLEGESWQDFLRNKAKSMRNALLSHRDGAKVALGTGFTEQQYETMENSLAFLTQQGFSLENALYAMQAVGIYTLGCVLLDQELQVAKEERETPTTDSMPPLVRQAIELHDHQGAEPAFLFGLEQIISGLEKQLKAESV

SEQ ID NO: 1440 - protein, 208 aa, Artificial Sequence
  synthetic construct; Sulfonylurea responsive repressor
MGSRLDKSKVINSALELLNEVGIEGLTTRKLAQKLGVEQPTLYWHVKNKRALLDAMAIEMFDRHDTHYCPLEGESWQDFLRNNAKSRRNALLSHRDGAKVALGTGFTEQQYETMENSLAFLTQQGFSLENALYAFQAVGIYTLGCVLLDQELQVAKEERETPTTDSMPPLVRQAYELKDHQGAEPAFLFGLELIISGLEKQLKCESGS

SEQ ID NO: 1441 - protein, 208 aa, Artificial Sequence
  synthetic construct; Sulfonylurea responsive repressor
MGSRLDKSKVINSALELLNEVGIEGLTTRKLAQKLGVEQPTLYWHVKNKRALLDAMAIEMLDRHDTHYCPLEGESWQDFLRNKAKSMRNALLSHRDGAKVALGTGFTEQQYETAENSLAFLTQQGFSLENALYAFQAVGIYTLGCVLLDQELQVAKEERETPTTDSMPPLVRQALELHDHQGAEPAFLFGLELIISGLEKQLKCESGS

SEQ ID NO: 1442 - protein, 208 aa, Artificial Sequence
  synthetic construct; Sulfonylurea responsive repressor
MGSRLDKSKVINSALELLNEVGIEGLTTRKLAQKLGVEQPTLYWHVKNKRALLDAMAIEMLDRHKTHYCPLEGESWQDFLRNKAKSMRNALLSHRDGAKVALGTGFTEQQYETAENSLAFLTQQGFSLENALYAFQAVGIYTLGCVLLDQELQVAKEERETPTTESMPPLVRQAYELKDHQGAEPAFLFGLELIISGLEKQLKCESGS

SEQ ID NO: 1443 - protein, 208 aa, Artificial Sequence
  synthetic construct; Sulfonylurea responsive repressor
MGSRLDKSKVINSALELLNEVGIEGLTTRKLAQKLGVEQPTLYWHVKNKRALLDAMAIEMFDRHDTHYCPLEGESWQDFLRNKAKSMRNALLSHRDGAKVALGTGFTEQQYETAENCLAFLTQQGFSLENALYAFQAVGIYTLGCVLLDQELQVAKEERETPTTDSMPPLVRQAYELRDHQGAEPAFLFGLELIISGLEKQLKAGKWV

SEQ ID NO: 1444 - protein, 208 aa, Artificial Sequence
  synthetic construct; Sulfonylurea responsive repressor
MGSRLDKSKVINSALELLNEVGIEGLTTRKLAQKLGVEQPTLYWHVKNKRALLDAMAIEMLDRHKTHYCPLEGESWQDFLRNRAKSMRNALLSHRDGAKVALGTGFTEQQYETMENSLAFLTQQGFSLENALYAFQAVGIYTLGCVLLDQELQVAKEERETPTTDSMPPLVRQAYELKDHQGAEPAFLFGLELIISGLEKQLKCESGS

SEQ ID NO: 1445 - protein, 208 aa, Artificial Sequence
  synthetic construct; Sulfonylurea responsive repressor
MGSRLDKSKVINSALELLNEVGIEGLTTRKLAQKLGVEQPTLYWHVKNKRALLDAMAIEMFDRHDTHYCPLEGESWQDFLRNKAKSMRNALLSHRDGAKVALGTGFTEQQYETAENCLAFLTQQGFSLENALYAFQAVGIYTLGCVLLDQELQVAKEERETPTTDSMPPLVRQAIELHDHQGAEPAFLFGLELIISGLEKQLKAESGS

SEQ ID NO: 1446 - protein, 200 aa, Artificial Sequence
  synthetic construct; Sulfonylurea responsive repressor
  MISC_FEATURE (84)..(84): Xaa = Any Amino Acid
  MISC_FEATURE (111)..(111): Xaa = Any Amino Acid
  MISC_FEATURE (168)..(168): Xaa = Any Amino Acid
  MISC_FEATURE (171)..(171): Xaa = Any Amino Acid
  MISC_FEATURE (172)..(172): Xaa = Any Amino Acid
  MISC_FEATURE (184)..(184): Xaa = Any Amino Acid
  MISC_FEATURE (188)..(188): Xaa = Any Amino Acid
MGSRLDKSKVINSALELLNEVGIEGLTTRKLAQKLGVEQPTLYWHVKNKRALLDAMAIEMLDRHKTHYLSFGRGKLARLLEEQXVHEKCFAQSPWSQGRSRYGLHGATVNXGELSCLPDTTRFLPERPLRNASCWDLHSGLRLAGSRAASRGGEGNTYYYAATGSTSXRTXXSPRCRASLPVRXTDHXWIGEAAEGRKWV

SEQ ID NO: 1447 - protein, 206 aa, Artificial Sequence
  synthetic construct; Sulfonylurea responsive repressor
MGSRLDKSKVINSALELLNEVGIEGLTTRKLAQKLGVEQPTLYWHVKNKRALLDAMAIEMFDRHDTHYLPLEGESWQDFLRNKAKSMRNALLSHRDGAKVALGTGFTEQQYETMENSLAFLTQQGFSLENALYAFQAVGIYTLGCVLLDQELQVAKEERETPTTDSMPPLVRQAYELKDHQGAEPAFLFGLELIICGLQLKCESGS

SEQ ID NO: 1448 - protein, 208 aa, Artificial Sequence
  synthetic construct; Sulfonylurea responsive repressor
MGSRLDKSKVINSALELLNEVGIEGLTTRKLAQKLGVEQPTLYWHVKNKRALLDAMAIEMLDRHDTHYLPLEGESWQDFLRNNAKSRRNALLSHRDGAKVALGTGFTEQQYETMENSLAFLTQQGFSLENALYAFQAVGIYTLGCVLLDQELQVAKEERETPTTDSMPPLVRQAYELKDHQGAEPAFLFGLELIICGLEKQLKCESGS

SEQ ID NO: 1449 - protein, 208 aa, Artificial Sequence
  synthetic construct; Sulfonylurea responsive repressor
MGSRLDKSKVINSALELLNEVGIEGLTTRKLAQKLGVEQPTLYWHVKNKRALLDAMAIEMMDRHKTHYCPLEGESWQDFLRNKAKSRRNALLSHRDGAKVCLGTGFTEQQYETAENWLAFLTQQGFSLENALYAMQAVGIYTLGCVLLDQELQVAKEERETPTTDSMPPLVRQAYELKDHQGAEPAFLFGLELIISGLEKQLKCESGS

SEQ ID NO: 1450 - protein, 208 aa, Artificial Sequence
  synthetic construct; Sulfonylurea responsive repressor
MGSRLDKSKVINSALELLNEVGIEGLTTRKLAQKLGVEQPTLYWHVKNKRALLDAMAIEMLDRHDTHYLPLEGESWQDFLRNNAKSRRNALLSHRDGAKVALGTGFTEQQYETMENSLAFLTQQGFSLENALYAMQAVGIYTLGCVLLDQELQVAKEERETPTTDSMPPLVRQAYELKDHQGAEPAFLFGLELIICGLEKQLKAESGS

SEQ ID NO: 1451 - protein, 208 aa, Artificial Sequence
  synthetic construct; Sulfonylurea responsive repressor
MGSRLDKSKVINSALELLNEVGIEGLTTRKLAQKLGVEQPTLYWHVKNKRALLDAMAIEMLDRHATHYCPLEGESWQDFLRNKAKSRRNALLSHRDGAKVALGTGFTEQQYETMENSLAFLTQQGFSLENALYAMQAVGIYTLGCVLLDQELQVAKEERETPTTDSMPPLVRQAYELKDHQGAEPAFLFGLELIICGLEKQLKCESGS

SEQ ID NO: 1452 - protein, 208 aa, Artificial Sequence
  synthetic construct; Sulfonylurea responsive repressor
MGSRLDKSKVINSALELLNEVGIEGLTTRKLAQKLGVEQPTLYWHVKNKRALLDAMAIEMLDRHATHYLPLEGESWQDFLRNNAKSRRNALLSHRDGAKVCLGTGFTEQQYETMENSLAFLTQQGFSLENALYAMQAVGIYTLGCVLLDQELQVAKEERETPTTDSMPPLVRQAYELKDHQGAEPAFLFGLELIICGLEKQLKCESGS

SEQ ID NO: 1453 - protein, 208 aa, Artificial Sequence
  synthetic construct; Sulfonylurea responsive repressor
MGSRLDKSKVINSALELLNEVGIEGLTTRKLAQKLGVEQPTLYWHVKNKRALLDAMAIEMLDRHATHYCPLEGESWQDFLRNKAKSRRNALLSHRDGAKVALGTGFTEQQYETMENSLAFLTQQGFSIENALYAMQAVGIYTLGCVLLDQELQVAKEERETPTTDSMPPLVRQAYELRDHQGAEPAFLFGLELIICGLEKQLKCESGS

SEQ ID NO: 1454 - protein, 208 aa, Artificial Sequence
  synthetic construct; Sulfonylurea responsive repressor
MGSRLDKSKVINSALELLNEVGIEGLTTRKLAQKLGVEQPTLYWHVKNKRALLDAMAIEMLDRHATHYLPLEGESWQDFLRNRAKSMRNALLSHRDGAKVALGTGFTEQQYETMENCLAFLTQQGFSLENALYAFQAVGIYTLGCVLLDQELQVAKEERETPTTDSMPPLVRQAYELKDHQGAEPAFLFGLELIISGLEKQLKAESGS

SEQ ID NO: 1455 - protein, 206 aa, Artificial Sequence
  synthetic construct; Sulfonylurea responsive repressor
MGSRLDKSKVINSALELLNEVGIEGLTTRKLAQKLGVEQPTLYWHVKNKRALLDAMAIEMLDRHDTHYCPLEGESWQDFLRNKAKSMRNALLSHRDGAKVCLGTGFTEQQYETAENSLAFLTQQGFSLENALYAGQAVGIYTLGCVLLDQELQVAKEERETPTTDSMPPLVRQALELHDHQGAEPAFLFGLELIISGLEKHRQKWV

SEQ ID NO: 1456 - protein, 208 aa, Artificial Sequence
  synthetic construct; Sulfonylurea responsive repressor
MGSRLDKSKVINSALELLNEVGIEGLTTRKLAQKLGVEQPTLYWHVKNKRALLDAMAIEMLDRHATHYCPLEGESWQDFLRNKAKSMRNALLSHRDGAKVALGTGFTEQQYETMENSLAFLTQQGFSLENALYAFQAVGIYTLGCVLLDQELQVAKEERETPTTDSMPPLVRQAYELKDHQGAEPAFLFGLELIISGLEKQLKAESGS

SEQ ID NO: 1457 - protein, 208 aa, Artificial Sequence
  synthetic construct; Sulfonylurea responsive repressor
MGSRLDKSKVINSALELLNEVGIEGLTTRKLAQKLGVEQPTLYWHVKNKRALLDAMAIEMFDRHKTHYCPLEGESWQDFLRNNAKSRRNALLSHRDGAKVALGTGFTEQQYETAENCLAFLTQQGFSLENALYAMQAVGIYTLGCVLLDQELQVAKEERETPTTDSMPPLVRQAYELKDHQGAEPAFLFGLELIICGLEKQLKAESGS

SEQ ID NO: 1458 - protein, 208 aa, Artificial Sequence
  synthetic construct; Sulfonylurea responsive repressor
MGSRLDKSKVINSALELLNEVGIEGLTTRKLAQKLGVEQPTLYWHVKNKRALLDAMAIDMLDRHKTHYCPLEGESWQDFLRNRAKSMRNALLSHRDGAKVALGTGFTEQQYETMENCLAFLTQQGFSLENALYAMQAVGIYTLGCVLLDQELQVAKEERETPTTDSMPPLVRQAYELRDHQGAEPAFLFGLELIISGLEKQLKAESGS

SEQ ID NO: 1459 - protein, 208 aa, Artificial Sequence
  synthetic construct; Sulfonylurea responsive repressor
MGSRLDKSKVINSALELLNEVGIEGLTTRKLAQKLGVEQPTLYWHVKNKRALLDAMAIEMLDRHATHYLPLEGESWQDFLRNRAKSMRNALLSHRDGAKVALGTGFTEQQYETAENSLAFLTQQGFSLENALYAFQAVGIYTLGCVLLDQELQVAKEERETPTTDSMPPLVRQALELHDHQGAEPAFLFGLELIICGLEKQLKAESGS

SEQ ID NO: 1460 - protein, 208 aa, Artificial Sequence
  synthetic construct; Sulfonylurea responsive repressor
MGSRLDKSKVINSALELLNEVGIEGLTTRKLAQKLGVEQPTLYWHVKNKRALLDAMAIEMFDRHDTHYCPLEGESWQDFLRNKAKSMRNALLSHRDGAKVALGTGFTEQQYETAENCLAFLTQQGFSLENALYAFQAVGIYTLGCVLLDQELQVAKEERETPTTDSMPPLVRQALELHDHQGAEPAFLFGLELIICGLEKQLKCESGS

SEQ ID NO: 1461 - protein, 208 aa, Artificial Sequence
  synthetic construct; Sulfonylurea responsive repressor
MGSRLDKSKVINSALELLNEVGIEGLTTRKLAQKLGVEQPTLYWHVKNKRALLDAMAIEMLDRHKTHYCPLEGESWQDFLRNKAKSMRNALLSHRDGAKVALGTGFTEQQYETMENSLAFLTQQGFSLENALYAMQAVGIYTLGCVLLDQELQVAKEERETPTTDSMPPLVRQAYELKDHQGAEPAFLFGLELIISGLEKQLKCESGS

SEQ ID NO: 1462 - protein, 208 aa, Artificial Sequence
  synthetic construct; Sulfonylurea responsive repressor
MGSRLDKSKVINSALELLNEVGIEGLTTRKLAQKLGVEQPTLYWHVKNKRALLDAMAIEMLDRHATHYCPLEGESWQDFLRNRAKSMRNALLSHRDGAKVALGTGFTEQQYETMENSLAFLTQQGFSLENALYAFQAVGIYTLGCVLLDQELQVAKEERETPTTDSMPPLVRQAYELKDHQGAEPAFLFGLELIICGLEKQLKCESGS

SEQ ID NO: 1463 - protein, 208 aa, Artificial Sequence
  synthetic construct; Sulfonylurea responsive repressor
MGSRLDKSKVINSALELLNEVGIEGLTTRKLAQKLGVEQPTLYWHVKNKRALLDAMAIEMFDRHKTHYLPLEGESWQDFLRNRAKSMRNALLSHRDGAKVALGTGFTEQQYETAENSLAFLTQQGFSLENALYAFQAVGIYTLGCVLLDQELQVAKEERETPTTDSMPPLVRQAIELHDHQGAEPAFLFGLELIISGLEKQLKCESGS

SEQ ID NO: 1464 - protein, 208 aa, Artificial Sequence
  synthetic construct; Sulfonylurea responsive repressor
MGSRLDKSKVINSALELLNEVGIEGLTTRKLAQKLGVEQPTLYWHVKNKRALLDAMAIEMFDRHAIHYCPLEGESWQDFLRNNAKSRRNALLRHRDGAKVALGTGFTEQQYETAENSLAFLTQQGFSLENALYAFQAVGIYTLGCVLLDQELQVAKEERETPTTDSMPPLVRQAYELRDHQGAEPAFLFGLELIICGLEKQLKCESGS

SEQ ID NO: 1465 - protein, 208 aa, Artificial Sequence
  synthetic construct; Sulfonylurea responsive repressor
MGSRLDKSKVINSALELLNEVGIEGLTTRKLAQKLGVEQPTLYWHVKNKRALLDAMAIEMLDRHKTHYCPLEGESWQDFLRNKAKSMRNALLSHRDGAKVCLGTGFTEQQYETMENSLAFLTQQGFSLENALYAMQAVGIYTLGCVLLDQELQVAKEERETPTTDSMPPLVRQAYELKDHQGAEPAFLFGLELIICGLEKQLKAESGS

SEQ ID NO: 1466 - protein, 208 aa, Artificial Sequence
  synthetic construct; Sulfonylurea responsive repressor
MGSRLDKSKVINSALELLNEVGIEGLTTRKLAQKLGVEQPTLYWHVKNKRALLDAMAIEMFDRHDTHYLPLEGKSWQDFLRNRAKSMRNALLSHRDGAKVALGTGFTEQQYETAENSLAFLTQQGFSLENALYAFQAVGIYTLGCVLLDQELQVAKEERETPTTDSMPPLVRQAYELHDHQGAEPAFLFGLELIISGLEKQLKCESGS

SEQ ID NO: 1467 - protein, 207 aa, Artificial Sequence
  synthetic construct; Sulfonylurea responsive repressor
MARLDKSKVINSALELLNEVGIEGLTTRKLAQKLGVEQPTLYWHVKNKRALLDAMAIEMLDRHKTHYCPLEGESWQDFLRNKAKSMRNALLSHRDGAKVALGTGFTEQQYETAENSLAFLTQQGFSLENALYAGQAVGIYTLGCVLLDQELQVAKEERETPTTDSMPPLVRQAYELRDHQGAEPAFLFGLELIISGLEKQLKAESGS

SEQ ID NO: 1468 - protein, 207 aa, Artificial Sequence
  synthetic construct; Sulfonylurea responsive repressor
MARLDKSKVINSALELLNEVGIEGLTTRKLAQKLGVEQPTLYWHVKNKRALLDAMAIEMFDRHATHYLPLEGESWQDFLRNKAKSMRNALLSHRDGAKVALGTGFTEQQYETMENSLAFLTQQGFSLENALYAMQAVGIYTLGCVLLDQELQVAKEERETPTTDSMPPLVRQAIELHDHQGAEPAFLFGLELIISGLEKQLKAESGS

SEQ ID NO: 1469 - protein, 207 aa, Artificial Sequence
  synthetic construct; Sulfonylurea responsive repressor
MARLDKSKVINSALELLNEVGIEGLTTRKLAQKLGVEQPTLYWHVKNKRALLDAMAIEMFDRHATHYLPLEGESWQDFLRNKAKSMRNALLSHRDGAKVALGTGFTEQQYETMENCLAFLTQQGFSLENALYAMQAVGIYTLGCVLLDQELQVAKEERETPTTDSMPPLVRQAYELKDHQGAEPAFLFGLELIICGLEKQLKAESGS

SEQ ID NO: 1470 - protein, 207 aa, Artificial Sequence
  synthetic construct; Sulfonylurea responsive repressor
MARLDKSKVINSALELLNEVGIEGLTTRKLAQKLGVEQPTLYWHVKNKRALLDAMAIEMLDRHKTHYCPLEGESWQDFLRNKAKSMRNALLSHRDGAKVALGTGFTEQQYETMENCLAFLTQQGFSLENALYAMQAVGIYTLGCVLLDQELQVAKEERETPTTDSMPPLVRQAYELRDHQGAEPAFLFGLELIICGLEKQLKCESGS

SEQ ID NO: 1471 - protein, 207 aa, Artificial Sequence
  synthetic construct; Sulfonylurea responsive repressor
MARLDKSKVINSALELLNEVGIEGLTTRKLAQKLGVEQPTLYWHVKNKRALLDAMAIEMLDRHATHYLPLEGESWQDFLRNKAKSMRNALLSHRDGAKVALGTGFTEQQYETAENSLAFLTQQGFSLENALYAFQAVGIYTLGCVLLDQELQVAKEERETPTTDSMPPLVRQAIELRDHQGAEPAFLFGLELIISGLEKQLKCESGS

SEQ ID NO: 1472 - protein, 207 aa, Artificial Sequence
  synthetic construct; Sulfonylurea responsive repressor
MARLDKSKVINSALELLNEVGIEGLTTRKLAQKLGVEQPTLYWHVKNKRALLDAMAIEMFDRHATHYCPLEGESWQDFLRNKAKSMRNALLRHRDGAKVALGTGFTEQQYETAENCLAFLTQQGFSLENALYAFQAVGIYTLGCVLLDQELQVAKEERETPTTDSMPPLVRQAIELKDHQGAEPAFLFGLELIICGLEKQLKCESGS

SEQ ID NO: 1473 - protein, 207 aa, Artificial Sequence
  synthetic construct; Sulfonylurea responsive repressor
MARLDKSKVINSALELLNEVGIEGLTTRKLAQKLGVEQPTLYWHVKNKRALLDAMAIEMFDRHKTHYLPLEGESWQDFLRNRAKSMRNALLSHRDGAKVALGTGFTEQQYETMENSLAFLTQQGFSLENALYAMQAVGIYTLGCVLLDQELQVAKEERETPTTDSMPPLVRQAIELKDHQGAEPAFLFGLELIISGLEKQLKAESGS

SEQ ID NO: 1474 - protein, 207 aa, Artificial Sequence
  synthetic construct; Sulfonylurea responsive repressor
MARLDKSKVINSALELLNEVGIEGLTTRKLAQKLGVEQPTLYWHVKNKRALLDAMAIEMFDRHDTHYLPLEGESWQDFLRNKAKSMRNALLSHRDGAKVALGTGFTEQQYETAENCLAFLTQQGFSLENALYAFQAVGIYTLGCVLLDQELQVAKEERETPTTDSMPPLVRQAYELRDHQGAEPAFLFGLELIICGLEKQLKCESGS

SEQ ID NO: 1475 - protein, 207 aa, Artificial Sequence
  synthetic construct; Sulfonylurea responsive repressor
MARLDKSKVINSALELLNEVGIEGLTTRKLAQKLGVEQPTLYWHVKNKRALLDAMAIEMFDRHATHYCPLEGESWQDFLRNRAKSMRNALLSHRDGAKVCLGTGFTEQQYETMENSLAFLTQQGFSLENALYAMQAVGIYTLGCVLLDQELQVAKEERETPTTDSMPPLVRQAFELKDHQGAEPAFLFGLELIICGLEKQLKCESGS

SEQ ID NO: 1476 - protein, 207 aa, Artificial Sequence
  synthetic construct; Sulfonylurea responsive repressor
MARLDKSKVINSALELLNEVGIEGLTTRKLAQKLGVEQPTLYWHVKNKRALLDAMAIEMLDRHATHYLPLEGESWQDFLRNKAKSMRNALLSHRDGAKVALGTGFTEQQYETMENSLAFLTQQGFSLENALYAMQAVGIYTLGCVLLDQELQVAKEERETPTTDSMPPLVRQAYELRDHQGAEPAFLFGLELIISGLEKQLKCESGS

SEQ ID NO: 1477 - protein, 207 aa, Artificial Sequence; identical to SEQ ID NO: 863
  synthetic construct; Sulfonylurea responsive repressor

SEQ ID NO: 1478 - protein, 207 aa, Artificial Sequence
  synthetic construct; Sulfonylurea responsive repressor
MARLDKSKVINSALELLNEVGIEGLTTRKLAQKLGVEQPTLYWHVKNKRALLDAMAIEMLDRHKTHYLPLEGESWQDFLRNNAKSMRNALLSHRDGAKVCLGTGFTEQQYETAENWLAFLTQQGFSLENALYAFQAVGIYTLGCVLLDQELQVAKEERETPTTDSMPPLVRQALELHDHQGAEPAFLFGLELIISGLEKQLKAESGS

SEQ ID NO: 1479 - protein, 207 aa, Artificial Sequence
  synthetic construct; Sulfonylurea responsive repressor
MARLDKSKVINSALELLNEVGIEGLTTRKLAQKLGVEQPTLYWHVKNKRALLDAMAIEMFDRHKTHYCPLEGESWQDFLRNRAKSMRNALLSHRDGAKVALGTGFTEQQYETAENCLAFLTQQGFSLENALYAFQAVGIYTLGCVLLDQELQVAKEERETPTTDSMPPLVRQAIELHDHQGAEPAFLFGLELIICGLEKQLKCESGS

SEQ ID NO: 1480 - protein, 207 aa, Artificial Sequence
  synthetic construct; Sulfonylurea responsive repressor
MARLDKSKVINSALELLNEVGIEGLTTRKLAQKLGVEQPTLYWHVKNKRALLDAMAIEMFDRHATHYLPLEGESWQDFLRNNAKSRRNALLSHRDGAKVALGTGFTEQQYETMENSLAFLTQQGFSLENALYAMQAVGIYTLGCVLLDQELQVAKEERETPTTDSMPPLVRQAYELRDHQGAEPAFLFGLELIICGLEKQLKAESGS

SEQ ID NO: 1481 - protein, 207 aa, Artificial Sequence
  synthetic construct; Sulfonylurea responsive repressor
MARLDKSKVINSALELLNEVGIEGLTTRKLAQKLGVEQPTLYWHVKNKRALLDAMAIEMLDRHKTHYCPLEGESWQDFLRNKAKSMRNALLSHRDGAKVALGTGFTEQQYETMENSLAFLTQQGFSLENALYAFQAVGIYTLGCVLLDQELQVAKEERETPTTDSMPPLVRQAYELRDHQGAEPAFLFGLELIISGLEKQLKAESGS

SEQ ID NO: 1482 - protein, 207 aa, Artificial Sequence
  synthetic construct; Sulfonylurea responsive repressor
MARLDKSKVINSALELLNEVGIEGLTTRKLAQKLGVEQPTLYWHVKNKRALLDAMAIEMLDRHATHYCPLEGESWQDFLRNNAKSMRNALLSHRDGAKVALGTGFTEQQYETMENSLAFLTQQGFSLENALYAMQAVGIYTLGCVLLDQELQVAKEERETPTTDSMPPLVRQAYELRDHQGAEPAFLFGLELIISGLEKQLKCESGS

SEQ ID NO: 1483 - protein, 207 aa, Artificial Sequence
  synthetic construct; Sulfonylurea responsive repressor
MARLDKSKVINSALELLNEVGIEGLTTRKLAQKLGVEQPTLYWHVKNKRALLDAMAIEMFDRHKTHYCPLEGESWQDFLRNRAKSMRNALLSHRDGAKVALGTGFTEQQYETMENCLAFLTQQGFSLENALYAMQAVGIYTLGCVLLDQELQVAKEERETPTTDSMPPLVRQAYELRDHQGAEPAFLFGLELIICGLEKQLKCESGS

SEQ ID NO: 1484 - protein, 207 aa, Artificial Sequence
  synthetic construct; Sulfonylurea responsive repressor
MARLDKSKVINSALELLNEVGIEGLTTRKLAQKLGVEQPTLYWHVKNKRALLDAMAIEMLDRHDTHYCPLEGESWQDFLRNKAKSMRNALLSHRDGAKVALGTGFTEQQYETMENCLAFLTQQGFSLENALYAMQAVGIYTLGCVLLDQELQVAKEERETPTTDSMPPLVRQAYELRDHQGAEPAFLFGLELIISGLEKQLKAESGS

SEQ ID NO: 1485 - protein, 207 aa, Artificial Sequence
  synthetic construct; Sulfonylurea responsive repressor
MARLDKSKVINSALELLNEVGIEGLTTRKLAQKLGVEQPTLYWHVKNKRALLDAMAIEMLDRHDTHYLPLEGESWQDFLRNKAKSMRNALLSHRDGAKVALGTGFTEQQYETMENCLAFLTQQGFSLENALYAFQAVGIYTLGCVLLDQELQVAKEERETPTTDSMPPLVRQAYELRDHQGAEPAFLFGLELIISGLEKQLKCESGS

SEQ ID NO: 1486 - protein, 207 aa, Artificial Sequence
  synthetic construct; Sulfonylurea responsive repressor
MARLDKSKVINSALELLNEVGIEGLTTRKLAQKLGVEQPTLYWHVKNKRALLDAMAIEMFDRHKTHYLPLEGESWQDFLRNRAKSMRNALLSHRDGAKVALGTGFTEQQYETAENSLAFLTQQGFSLENALYAFQAVGIYTLGCVLLDQELQVAKEERETPTTDSMPPLVRQAYELKDHKGAEPAFLFGLELIICGLEKQLKAESGS

SEQ ID NO: 1487 - protein, 207 aa, Artificial Sequence
  synthetic construct; Sulfonylurea responsive repressor
MARLDKSKVINSALELLNEVGIEGLTTRKLAQKLGVEQPTLYWHVKNKRALLDAMAIEMLDRHATHYCPLEGESWQDFLRNKAKSMRNALLSHRDGAKVALGTGFTEQQYETAENCLAFLTQQGFSLENALYAFQAVGIYTLGCVLLDQELQVAKEERETPTTDSMPPLVRQAYELRDHQGAEPAFLFGLELIICGLEKQLKAESGS

SEQ ID NO: 1488 - protein, 207 aa, Artificial Sequence
  synthetic construct; Sulfonylurea responsive repressor
MARLDKSKVINSALELLNEVGIEGLTTRKLAQKLGVEQPTLYWHVKNKRALLDAMAIEMFDRHATHYCPLEGESWQDFLRNKAKSMRNALLSHRDGAKVALGTGFTEQQYETAENSLAFLTQQGFSLENALYAGQAVGIYTLGCVLLDQELQVAKEERETPTTDSMPPLVRQAYELKDHQGAEPAFLFGLELIICGLEKQLKCESGS

SEQ ID NO: 1489 - protein, 207 aa, Artificial Sequence
  synthetic construct; Sulfonylurea responsive repressor
MARLDKSKVINSALELLNEVGIEGLTTRKLAQKLGVEQPTLYWHVKNKRALLDAMAIEMFDRHDTHYLPLEGESWQDFLRNKAKSMRNALLSHRDGAKVALGTGFTEQQYETMENSLAFLTQQGFSLENALYAMQAVGIYTLGCVLLDQELQVAKEERETPTTDSMPPLVRQAYELRDHQGAEPAFLFGLELIISGLEKQLKAESGS

SEQ ID NO: 1490 - protein, 207 aa, Artificial Sequence
  synthetic construct; Sulfonylurea responsive repressor
MARLDKSKVINSALELLNEVGIEGLTTRKLAQKLGVEQPTLYWHVKNKRALLDAMAIEMFDRHKTHYCPLEGESWQDFLRNRAKARRNALLSHRDGAKVALGTGFTEQQYETAENWLAFLTQQGFSLENALYAMQAVGIYTLGCVLLDQELQVAKEERETPTTDSMPPLVRQAYELRDHQGAEPAFLFGLELIISGLEKQLKCESGS

SEQ ID NO: 1491 - protein, 207 aa, Artificial Sequence
  synthetic construct; Sulfonylurea responsive repressor
MARLDKSKVINSALELLNEVGIEGLTTRKLAQKLGVEQPTLYWHVKNKRALLDAMAIEMLDRHATHYCPLEGESWQDFLRNRAKSMRNALLSHRDGAKVALGTGFTEQQYETMENCLAFLTQQGFSLENALYAMQAVGIYTLGCVLLDQELQVAKEERETPTTDSMPPLVRQAYELRDHQGAEPAFLFGLELIICGLEKQLKCESGS

SEQ ID NO: 1492 - protein, 207 aa, Artificial Sequence
  synthetic construct; Sulfonylurea responsive repressor
MARLDKSKVINSALELLNEVGIEGLTTRKLAQKLGVEQPTLYWHVKNKRALLDAMAIEMFDRHATHYLPLEGESWQDFLRNRAKSMRNALLSHRDGAKVALGTGFTEQQYETAENCLAFLTQQGFSLENALYAFQAVGIYTLGCVLLDQELQVAKEERETPTTDSMPPLVRQAFELRDHQGAEPAFLFGLELIICGLEKQLKAESGS

SEQ ID NO: 1493 - protein, 207 aa, Artificial Sequence
  synthetic construct; Sulfonylurea responsive repressor
MARLDKSKVINSALELLNEVGIEGLTTRKLAQKLGVEQPTLYWHVKNKRALLDAMAIEMLDRHKTHYLPLEGESWQDFLRNKAKSMRNALLSHRDGAKVALGTGFTEQQYETMENSLAFLTQQGFSLENALYAMQAVGIYTLGCVLLDQELQVAKEERETPTTDSMPPLVRQAYELRDHQGAEPAFLFGLELIISGLEKQLKCESGS

SEQ ID NO: 1494 - protein, 207 aa, Artificial Sequence
  synthetic construct; Sulfonylurea responsive repressor
MARLDKSKVINSALELLNEVGIEGLTTRKLAQKLGVEQPTLYWHVKNKRALLDAMAIEMLDRHKTHYCPLEGESWQDFLRNRAKSMRNALLSHRDGAKVCLGTGFTEQQYETMENSLAFLTQQGFSLENALYAFQAVGIYTLGCVLLDQELQVAKEERETPTTDSMPPLVRQAYELRDHQGAEPAFLFGLELIISGLEKQLKAESGS

SEQ ID NO: 1495 - protein, 205 aa, Artificial Sequence
  synthetic construct; Sulfonylurea responsive repressor
MARLDKSKVINSALELLNEVGIEGLTTRKLAQKLGVEQPTLYWHVKNKRALLDAMAIEMFDRHKTHYLPLEGESWQDFLRNRAKSMRNALLSHRDGAKVALGTGFTEQQYETMENSLAFLTQQGFSLENALYAMQAVGIYTLGCVLLDQELQVAKEERETPTTDSMPPLVRQAIELHDHQGAEPAFLFGLELIISGLEKQQVKWV

SEQ ID NO: 1496 - protein, 207 aa, Artificial Sequence
  synthetic construct; Sulfonylurea responsive repressor
MARLDKSKVINSALELLNEVGIEGLTTRKLAQKLGVEQPTLYWHVKNKRALLDAMAIEMLDRHATHYCPLEGESWQDFLRNKAKSMRNALLSHRDGAKVALGTGFTEQQYETMENSLAFLTQQGFSLENALYAMQAVGIYTLGCVLLDQELQVAKEERETPTTDSMPPLVRQAYELRDHQGAEPAFLFGLELIICGLEKQLKCESGS

SEQ ID NO: 1497 - protein, 207 aa, Artificial Sequence; identical to SEQ ID NO: 405
  synthetic construct; Sulfonylurea responsive repressor

SEQ ID NO: 1498 - protein, 207 aa, Artificial Sequence
  synthetic construct; Sulfonylurea responsive repressor
MARLDKSKVINSALELLNEVGIEGLTTRKLAQKLGVEQPTLYWHVKNKRALLDAMAIEMLDRHKTHYLPLEGESWQDFLRNKAKSMRNALLSHRDGAKVALGTGFTEQQYETAENCLAFLTQQGFSLENALYAFQAVGIYTLGCVLLDQELQVAKEERETPTTDSMPPLVRQALELKDHQGAEPAFLFGLELIISGLEKQLKCESGS

SEQ ID NO: 1499 - protein, 207 aa, Artificial Sequence
  synthetic construct; Sulfonylurea responsive repressor
MARLDKSKVINSALELLNEVGIEGLTTRKLAQKLGVEQPTLYWHVKNKRALLDAMAIEMFDRHDTHYLPLEGESWQDFLRNKAKSMRNALLSHRDGAKVALGTGFTEQQYETMENSLAFLTQQGFSLENALYAMQAVGIYTLGCVLLDQELQVAKEERETPTTDSMPPLVRQAYELRDHKGAEPAFLFGLELIICGLEKQLKCESGS

SEQ ID NO: 1500 - protein, 207 aa, Artificial Sequence
  synthetic construct; Sulfonylurea responsive repressor
MARLDKSKVINSALELLNEVGIEGLTTRKLAQKLGVEQPTLYWHVKNKRALLDAMAIEMFDRHKTHYCPLEGESWQDFLRNRAKSMRNALLSHRDGAKVALGTGFTEQQYETAENCLAFLTQQGFSLENALYAFQAVGIYTLGCVLLDQELQVAKEERETPTTDSMPPLVRQAIELHDHQGAEPAFLFGLELIISGLEKQLKAESGS

SEQ ID NO: 1501 - protein, 207 aa, Artificial Sequence
  synthetic construct; Sulfonylurea responsive repressor
MARLDKSKVINSALELLNEVGIEGLTTRKLAQKLGVEQPTLYWHVKNKRALLDAMAIEMFDRHKTHYCPLEGESWQDFLRNRAKSMRNALLSHRDGAKVALGTGFTEQQYETMENCLAFLTQQGFSLENALYAMQAVGIYTLGCVLLDQELQVAKEERETPTTDSMPPLVRQAYELRDHQGAEPAFLFGLELIISGLEKQLKCESGS

SEQ ID NO: 1502 - protein, 207 aa, Artificial Sequence
  synthetic construct; Sulfonylurea responsive repressor
MARLDKSKVINSALELLNEVGIEGLTTRKLAQKLGVEQPTLYWHVKNKRALLDAMAIEMFDRHKTHYLPLEGESWQDFLRNRAKSMRNALLSHRDGAKVALGTGFTEQQYETMENSLAFLTQQGFSLENALYAFQAVGIYTLGCVLLDQELQVAKEERETPTTDSMPPLVRQAYELKDHQGAEPAFLFGLELIICGLEKQLKCESGS

SEQ ID NO: 1503 - protein, 207 aa, Artificial Sequence
  synthetic construct; Sulfonylurea responsive repressor
MARLDKSKVINSALELLNEVGIEGLTTRKLAQKLGVEQPTLYWHVKNKRALLDAMAIEMLDRHKTHYLPLEGESWQDFLRNRAKSMRNALLSHRDGAKVCLGTGFTEQQYETMENSLAFLTQQGFSLENALYAFQAVGIYTLGCVLLDQELQVAKEERETPTTDSMPPLVRQAYELRDHQGAEPAFLFGLELIISGLEKQLKCESGS

SEQ ID NO: 1504 - protein, 207 aa, Artificial Sequence
  synthetic construct; Sulfonylurea responsive repressor
MARLDKSKVINSALELLNEVGIEGLTTRKLAQKLGVEQPTLYWHVKNKRALLDAMAIEMLDRHKTHYCPLEGESWQDFLRNKAKSMRNALLSHRDGAKVALGTGFTEQQYETMENSLAFLTQQGFSLENALYAFQAVGIYTLGCVLLDQELQVAKEERETPTTDSMPPLVRQAYELRDHQGAEPAFLFGLELIICGLEKQLKCESGS

SEQ ID NO: 1505 - protein, 207 aa, Artificial Sequence
  synthetic construct; Sulfonylurea responsive repressor
MARLDKSKVINSALELLNEVGIEGLTTRKLAQKLGVEQPTLYWHVKNKRALLDAMAIEMLDRHKTHYLPLEGESWQDFLRNKAKSMRNALLSHRDGAKVALGTGFTEQQYETMENSLAFLTQQGFSLENALYAMQAVGIYTLGCVLLDQELQVAKEERETPTTDSMPPLVRQAYELRDHQGAEPAFLFGLELIICGLEKQLKAESGS

SEQ ID NO: 1506 - protein, 207 aa, Artificial Sequence
  synthetic construct; Sulfonylurea responsive repressor
MARLDKSKVINSALELLNEVGIEGLTTRKLAQKLGVEQPTLYWHVKNKRALLDAMAIEMLDRHKTHYLPLEGESWQDFLRNRAKSMRNALLSHRDGAKVCLGTGFTEQQYETMENCLAFLTQQGFSLENALYAFQAVGIYTLGCVLLDQELQVAKEERETPTTDSMPSLVRQAYELRDHQGAEPAFLFGLELIICGLEKQLKCESGS

SEQ ID NO: 1507 - protein, 207 aa, Artificial Sequence
  synthetic construct; Sulfonylurea responsive repressor
MARLDKSKVINSALELLNEVGIEGLTTRKLAQKLGVEQPTLYWHVKNKRALLDAMAIEMFDRHATHYCPLEGESWQDFLRNNAKSRRNALLSHRDGAKVALGTGFTEQQYETMENSLAFLTQQGFSLENALYAMQAVGIYTLGCVLLDQELQVAKEERETPTTDSMPPLVRQAYELRDHQGAEPAFLFGLELIISGLEKQLKCESGS

SEQ ID NO: 1508 - protein, 207 aa, Artificial Sequence; identical to SEQ ID NO: 1502
  synthetic construct; Sulfonylurea responsive repressor

SEQ ID NO: 1509 - protein, 205 aa, Artificial Sequence
  synthetic construct; Sulfonylurea responsive repressor
MARLDKSKVINSALELLNEVGIEGLTTRKLAQKLGVEQPTLYWHVKNKRALLDAMAIEMFDRHDTHYLPLEGESWQDFLRNKAKSMRNALLSHRDGAKVALGTGFTEQQYETAENCLAFLTQQGFSLENALYAFQAVGIYTLGCVLLDQELQVAKEERETPTTDSMPPLVRQAFELKDHQGAEPAFLFGLELIICGLEKQRQKVG

SEQ ID NO: 1510 - protein, 207 aa, Artificial Sequence
  synthetic construct; Sulfonylurea responsive repressor
MARLDKSKVINSALELLNEVGIEGLTTRKLAQKLGVEQPTLYWHVKNKRALLDAMAIEMFDRHKTHYCPLEGESWQDFLRNNAKSMRNALLSHRDGAKVALGTGFTEQQYETMENSLAFLTQQGFSLENALYAMQAVGIYTLGCVLLDQELQVAKEERETPTTDSMPPLVRQAYELKDHQGAEPAFLFGLELIICGLEKQLKAESGS

SEQ ID NO: 1511 - protein, 207 aa, Artificial Sequence
  synthetic construct; Sulfonylurea responsive repressor
MARLDKSKVINSALELLNEVGIEGLTTRKLAQKLGVEQPTLYWHVKNKRALLDAMAIEMLDRHKTHYCPLEGESWQDFLRNKAKSMRNALLSHRDGAKVCLGTGFTEQQYETMENSLAFLTQQGFSLENALYAMQAVGIYTLGCVLLDQELQVAKEERETPTTDSMPPLVRQAYELRDHQGAEPAFLFGLELIICGLEKQLKCESGS

SEQ ID NO: 1512 - protein, 207 aa, Artificial Sequence
  synthetic construct; Sulfonylurea responsive repressor
MARLDKSKVINSALELLNEVGIEGLTTRKLAQKLGVEQPTLYWHVKNKRALLDAMAIEMLDRHDTHYCPLEGESWQDFLRNKAKSMRNALLSHRDGAKVALGTGFTEQQYETMENSLAFLTQQGFSLENALYAFQAVGIYTLGCVLLDQELQVAKEERETPTTDSMPPLVRQAYELRDHQGAEPAFLFGLELIISGLEKQLKCESGS

SEQ ID NO: 1513 - protein, 207 aa, Artificial Sequence
  synthetic construct; Sulfonylurea responsive repressor
MARLDKSKVINSALELLNEVGIEGLTTRKLAQKLGVEQPTLYWHVKNKRALLDAMAIEMLDRHATHYLPLEGESWQDFLRNKAKSMRNALLSHRDGAKVCLGTGFTEQQYETMENSLAFLTQQGFSLENALYAMQAVGIYTLGCVLLDQELQVAKEERETPTTDSMPPLVRQAYELRDHQGAEPAFLFGLELIISGLEKQLKCESGS

SEQ ID NO: 1514 - protein, 207 aa, Artificial Sequence
  synthetic construct; Sulfonylurea responsive repressor
MARLDKSKVINSALELLNEVGIEGLTTRKLAQKLGVEQPTLYWHVKNKRALLDAMAIEMFDRHDTHYCPLEGESWQDFLRNKAKSMRNALLSHRDGAKVALGTGFTEQQYETAENSLAFLTQQGFSLENALYAFQAVGIYTLGCVLLDQELQVAKEERETPTTDSMPPLVRQALELHDHQGAEPAFLFGLELIICGLEKQLKCESGS

SEQ ID NO: 1515 - protein, 207 aa, Artificial Sequence
  synthetic construct; Sulfonylurea responsive repressor
MARLDKSKVINSALELLNEVGIEGLTTRKLAQKLGVEQPTLYWHVKNKRALLDAMAIEMFDRHATHYLPLEGESWQDFLRNRAKSMRNALLSHRDGAKVCLGTGFTEQQYETAENCLAFLTQQGFSLENALYAFQAVGIYTLGCVLLDQELQVAKEERETPTTDSMPPLVRQALELHDHQGAEPAFLFGLELIICGLEKQLKCESGS

SEQ ID NO: 1516 - protein, 207 aa, Artificial Sequence
  synthetic construct; Sulfonylurea responsive repressor
MARLDKSKVINSALELLNEVGIEGLTTRKLAQKLGVEQPTLYWHVKNKRALLDAMAIEMLDRHDTHYCPLEGETWQDFLRNKAKSRRNALLSHRDGAKVALGTGFTEQQYETAENWLAFLTQQGFSLENALYAMQAVGIYTLGCVLLDQELQVAKEERETPTTDSMPPLVRQAYELRDHQGAEPAFLFGLELIICGLEKQLKCESGS

SEQ ID NO: 1517 - protein, 207 aa, Artificial Sequence
  synthetic construct; Sulfonylurea responsive repressor
MARLDKSKVINSALELLNEVGIEGLTTRKLAQKLGVEQPTLYWHVKNKRALLDAMAIEMLDRHKTHYLPLEGESWQDFLRNRAKSMRNALLSHRDGAKVCLGTGFTEQQYETAENSLAFLTQQGFSLENALYAFQAVGIYTLGCVLLDQELQVAKEERETPTTDSMPPLVRQAFELKDHQGAEPAFLFGLELIICGLEKQLKCESGS

SEQ ID NO: 1518 - protein, 207 aa, Artificial Sequence
  synthetic construct; Sulfonylurea responsive repressor
MARLDKSKVINSALELLNEVGIEGLTTRKLAQKLGVEQPTLYWHVKNKRALLDAMAIEMLDRHKTHYCPLEGESWQDFLRNRAKSMRNALLSHRDGAKVCLGTGFTEQQYETAENSLAFLTQQGFSLENALYAFQAVGIYTLGCVLLDQELQVAKEERETPTTDSMPPLVRQAIELKDHQGAEPAFLFGLELIICGLEKQLKAESGS

SEQ ID NO: 1519 - protein, 207 aa, Artificial Sequence
  synthetic construct; Sulfonylurea responsive repressor
MARLDKSKVINSALELLNEVGIEGLTTRKLAQKLGVEQPTLYWHVKNKRALLDAMAIEMLDRHKTHYCPLEGESWQDFLRNKAKSMRNALLSHRDGAKVALGTGFTEQQYETMENSLAFLTQQGFSLENALYAMQAVGIYTLGCVLLDQELQVAKEERETPTTDSMPPLVRQAFELKDHQGAEPAFLFGLELIICGLEKQLKCESGS

SEQ ID NO: 1520 - protein, 207 aa, Artificial Sequence
  synthetic construct; Sulfonylurea responsive repressor
MARLDKSKVINSALELLNEVGIEGLTTRKLAQKLGVEQPTLYWHVKNKRALLDAMAIEMFDRHATHYLPLEGESWQDFLRNRAKSMRNALLSHRDGAKVALGTGFTEQQYETMENSLAFLTQQGFSLENALYAMQAVGIYTLGCVLLDQELQVAKEERETPTTDSMPPLVRQAFELKDHQGAEPAFLFGLELIISGLEKQLKAESGS

SEQ ID NO: 1521 - protein, 207 aa, Artificial Sequence
  synthetic construct; Sulfonylurea responsive repressor
MARLDKSKVINSALELLNEVGIEGLTTRKLAQKLGVEQPTLYWHVKNKRALLDAMAIEMLDRHKTHYLPLEGESWQDFLRNKAKSMRNALLSHRDGAKVCLGTGFTEQQYETAENCLAFLTQQGFSLENALYAFQAVGIYTLGCVLLDQELQVAKEERETPTTDSMPPLVRQALELKDHQGAEPAFLFGLELIISGLEKQLKAESGS

SEQ ID NO: 1522 - protein, 207 aa, Artificial Sequence
  synthetic construct; Sulfonylurea responsive repressor
MARLDKSKVINSALELLNEVGIEGLTTRKLAQKLGVEQPTLYWHVKNKRALLDAMAIEMLDRHKTHYCPLEGESWQDFLRNNAKSMRNALLSHRDGAKVCLGTGFTEQQYETMENSLAFLTQQGLSLENALYAMQAVGIYTLGCVLLDQELQVAKEERETPTTDSMPPLVRQAYELKDHQGAEPAFLFGLELIICGLEKQLKCESGS

SEQ ID NO: 1523 - protein, 207 aa, Artificial Sequence
  synthetic construct; Sulfonylurea responsive repressor
MARLDKSKVINSALELLNEVGIEGLTTRKLAQKLGVEQPTLYWHVKNKRALLDAMAIEMLDRHKTHYLPLEGESWQDFLRNRAKSMRNALLSHRDGAKVALGTGFTEQQYETMENSLAFLTQQGFSLENALYAMQAVGIYTLGCVLLDQELQVAKEERETPTTDSMPPLVRQAFELRDHQGAEPAFLFGLELIISGLEKQLKAESGS

SEQ ID NO: 1524 - protein, 207 aa, Artificial Sequence
  synthetic construct; Sulfonylurea responsive repressor
MARLDKSKVINSALELLNEVGIEGLTTRKLAQKLGVEQPTLYWHVKNKRALLDAMAIEMLDRHKTHYLPLEGESWQDFLRNKAKSMRNALLSHRDGAKVCLGTGFTEQQYETAENSLAFLTQQGFSLENALYAFQAVGIYTLGCVLLDQELQVAKEERETPTTDSMPPLVRQAFELKDHQGAEPAFLFGLELIICGLEKQLKCESGS

SEQ ID NO: 1525 - protein, 207 aa, Artificial Sequence
  synthetic construct; Sulfonylurea responsive repressor
MARLDKSKVINSALELLNEVGIEGLTTRKLAQKLGVEQPTLYWHVKNKRALLDAMAIEMLDRHQVHNLPLEGESWQDFLRNWAKSMRNALLSHRDGAKVCLGTGFTERQYETSENKLAFLTQQGFSLENALYAFQAVGIYTLGCVLLDQELQVAKEERETPTTDSMPPLVRQAIELADHQGAEPAFLFGLELIISGLEKQLKAESGS

SEQ ID NO: 1526 - protein, 207 aa, Artificial Sequence
  synthetic construct; Sulfonylurea responsive repressor
MARLDKSKVINSALELLNEVGIEGLTTRKLAQKLGVEQPTLYWHVKNKRALLDAMALEMLDRHKTHYLPLEGESWQNFLRNWAKSMRNALLSHRDGAKVCLGTGFTEQQYETMENSLAFLTQQGFSLENALYAFQAVGIYTLGCVLLDQELQVAKEERDTPTTDSMPPLVRQAIELADHQGAEPAFLFGLELIISGLEKQLKAESGS

SEQ ID NO: 1527 - protein, 207 aa, Artificial Sequence
  synthetic construct; Sulfonylurea responsive repressor
MARLDKSKVINSALELLNEVGIEGLTTRKLAQKLGVEQPTLYWHVKNKRALLDAMAIEMLDRHRTHYLPLEGESWQNFLRNKAKSMRNALLSHRDGAKVALGTGFTEKQYETQENSLAFLTQQGFSLENALYANQAVGIYTLGCVLLDQELQVAKEERETPTTDSMPPLVRQAIELADHQGAEPAFLFGLEVIISGLEKQLKAESGS

SEQ ID NO: 1528 - protein, 207 aa, Artificial Sequence
  synthetic construct; Sulfonylurea responsive repressor
MARLDKSKVINSALELLNEVGIEGLTTRKLAQKLGVEQPTLYWHVKNKRALLDAMAIEMLDRHQIHYLPLEGESWQDFLRNWAKSMRNALLSHRDGAKVCLGTGFTEQQYETAENSLAFLTQQGFSLENALYAFQAVGIYTLGCVLLDQELKVAKEERETPTTDSMPPLVRQAFELADHQGAEPAFLFGLEQIISGLEKQLKVESGS

SEQ ID NO: 1529 - protein, 207 aa, Artificial Sequence
  synthetic construct; Sulfonylurea responsive repressor
MARLDKSKVINSALELLNEVGIEGLTTRKLAQKLGVEQPTLYWHVKNKRALLDAMAREMLDRHTIHYLPLEGESWQNFLRNRAKSMRNALLSHRDGAKVCLGTGFTEQQYETMENSLAFLTQQGFSLENALYAMQAVGIYTLGCVLLDQELQVAKEERETPTTDSMPPLVRQAYELADHQGAEPAFLFGLELIISGLEKQLKAESGS

SEQ ID NO: 1530 - protein, 207 aa, Artificial Sequence
  synthetic construct; Sulfonylurea responsive repressor
MARLDKSKVINSALELLNEVGIEGLTTRKLAQKLGVEQPTLYWHVKNKRALLDAMAIEMLDRHQIHYLPLEGESWQNFLRNRAKSMRNALLSHRDGAKVCLGTGFTEQQYETMENSLAFLTQQGFSLENALYAFQAVGIYTLGCVLLDQELQVAKEERETPTTDSMPPLVRQAVELADHQGAEPAFLFGLELIISGLEKQLKAESGS

SEQ ID NO: 1531 - protein, 207 aa, Artificial Sequence
  synthetic construct; Sulfonylurea responsive repressor
MARLDKSKVINSALELLNEVGIEGLTTRKLAQKLGVEQPTLYWHVKNKRALLDAMAIEMLDRHRTHYLPLEGESWQNFLRNKAKSMRNALLSHRDGAKVCLGTGFTERQYETQENSLAFLTQQGFSLENALYANQAVGIYTLGCVLLDQELQVAKEERETPTTDSMPPLVRQAIELNDHQGAEPAFLFGLELIISGLEKQLKAESGS

SEQ ID NO: 1532 - protein, 207 aa, Artificial Sequence
  synthetic construct; Sulfonylurea responsive repressor
MARLDKSKVINSALELLNEVGIEGLTTRKLAQKLGVEQPTLYWHVKNKRALLDAMAIEMLDRHRTHYLPLEGESWQDFLRNWAKSMRNALLSHRDGAKVALGTGFTEQQYETMENSLAFLTQQGFSLENALYANQAVGIYTLGCVLLDQELQVAKEERETPTTDSLPPLVRQAFELSDHQGAEPAFLFGLELIISGLEKQLKAESGS

SEQ ID NO: 1533 - protein, 207 aa, Artificial Sequence
  synthetic construct; Sulfonylurea responsive repressor
MARLDKSKVINSALELLNEVGIEGLTTRKLAQKLGVEQPTLYWHVKNKRALLDAMAIEMLDRHRIHYLPLEGESWQNFLRNWAKSMRNALLSHRDGAKVCLGTGFTEQQYETSENSLAFLTQQGFSLENALYAMQAVGIYTLGCVLLDQELQVAKEERETPTTDSMPPLVRQAVELNDHQGAEPAFLFGLEQIISGLEKQLKAESGS

SEQ ID NO: 1534 - protein, 207 aa, Artificial Sequence
  synthetic construct; Sulfonylurea responsive repressor
MARLDKSKVINSALELLNEVGIEGLTTRKLAQKLGVEQPTLYWHVKNKRALLDAMAIEMLDRHQIHYLPLEGESWQDFLRNKAKSMRNALLSHRDGAKVCLGTGFTEQQYETAENSLAFLTQQGFSLENALYANQAVGIYTLGCVLLDQELQVAKEERETPTTDSMPPLVRQAIELNDHQGAEPAFLFGLELIISGLEKQLKAESGS

SEQ ID NO: 1535 - protein, 207 aa, Artificial Sequence
  synthetic construct; Sulfonylurea responsive repressor
MARLDKSKVINSALELLNEVGIEGLTTRKLAQKLGVEQPTLYWHVKNKRALLDAMAVEMLDRHQTHYLPLEGESWQDFLRNWAKSMRNALLSHRDGAKVCLGTGFTEQQYETMENSLAFLTQQGFSLENALYAFQAVGIYTLGCVLLDQELQVAKEERETPTTDSMPPLVRQAVELADHQGAEPAFLFGLELIISGLEKQLKAESGS

SEQ ID NO: 1536 - protein, 207 aa, Artificial Sequence
  synthetic construct; Sulfonylurea responsive repressor
MARLDKSKVINSALELLNEVGIEGLTTRKLAQKLGVEQPTLYWHVKNKRALLDAMAIEMLDRHRTHYLPLEGESWQDFLRNKAKSMRNALLSHRDGAKVCLGTGFTERQYETQENNLAFLTQQGFSLENALYANQAVGIYTLGCVLLDQELQVAKEERETPTTDSMPPLVRQAFELADHQGAEPAFLFGLELIISGLEKQLKAESGS

SEQ ID NO: 1537 - protein, 207 aa, Artificial Sequence
  synthetic construct; Sulfonylurea responsive repressor
MARLDKSKVINSALELLNEVGIEGLTTRKLAQKLGVEQPTLYWHVKNKRALLDAMAIEMLDRHRIHYLPLEGESWQDFLRNKAKSMRNALLSHRDGAKVCLGTGFTEQQYETQENSLAFLTQQGFSLENALYANQAVGIYTLGCVLLDQELQVAKEERETPTTDSMPPLVRQAIELADHQGAEPAFLFGLELIISGLEKQLKAESGS

SEQ ID NO: 1538 - protein, 207 aa, Artificial Sequence
  synthetic construct; Sulfonylurea responsive repressor
  MISC_FEATURE (64)..(64): Xaa = Any Amino Acid
  MISC_FEATURE (73)..(73): Xaa = Any Amino Acid
  MISC_FEATURE (82)..(82): Xaa = Any Amino Acid
  MISC_FEATURE (100)..(100): Xaa = Any Amino Acid
  MISC_FEATURE (108)..(108): Xaa = Any Amino Acid
  MISC_FEATURE (116)..(116): Xaa = Any Amino Acid
  MISC_FEATURE (177)..(177): Xaa = Any Amino Acid
MARLDKSKVINSALELLNEVGIEGLTTRKLAQKLGVEQPTLYWHVKNKRALLDAMAIEMLDRHXIHYLPLEGXSWQDFLRNXAKSMRNALLSHRDGAKVXLGTGFTEXQYETMENXLAFLTQQGFSLENALYAMQAVGIHTLGCVLLDQELQVAKEERETPTTDSMPPLVRQAFELXDHQGAEPAFLFGLELIISGLEKQLKAESGS

SEQ ID NO: 1539 - protein, 207 aa, Artificial Sequence
  synthetic construct; Sulfonylurea responsive repressor
MARLDKSKVINSALELLNEVGIEGLTTRKLAQKLGVEQPTLYWHVKNKRALLDAMAKEMLDRHQTHYLPLEGESWQNFLRNWAKSMRNALLSHRDGAKVCLGTGFTERQYETAENNLAFLKQQGFSLENALYANQAVGIYTLGCVLLDQELQVAKEERETPTADSMPPLVRQAIELNDHQGAEPAFLFGLELIISGLEKQLKAESGS

SEQ ID NO: 1540 - protein, 207 aa, Artificial Sequence
  synthetic construct; Sulfonylurea responsive repressor
MARLDKSKVINSALELLNEVGIEGLTTRKLAQKLGVEQPTLYWHVKNKRALLDAMAIEMLDRHKTHYLPLEGESWQDFLRNKAKSMRNALLSHRDGAKVALGTGFTENQYETAENSLAFLTQQGFSLENALYAFQAVGIYTLGCVLLDQELQVAKEERETPTTDSMPPLVRQAVELADHQGAEPAFLFGLELIISGLEKQLKAESGS

SEQ ID NO: 1541 - protein, 207 aa, Artificial Sequence
  synthetic construct; Sulfonylurea responsive repressor
MARLDKSKVINSALELLNEVGIEGLTTRKLAQKLGVEQPTLYWHVKNKRALLDAMAIEMLDRHQIHYLPLEGESWQDFLRNRAKSMRNALLSHRDGAKVCLGTGYTEQQYETSENSLAFLTQQGFSLENALYAFQAVGIYTLGCVLLDQELQVAKVERETPITDSMPPLVRQAVELNDHQGAEPAFLFGLELIISGLEKQLKAESGS

SEQ ID NO: 1542 - protein, 207 aa, Artificial Sequence
  synthetic construct; Sulfonylurea responsive repressor
MARLDKSKVINSALELLNEVGIEGLTTRKLAQKLGVEQPTLYWHVKNKRALLDAMAIEMLDRHQTHYLPLEGESWQDFLRNKAKSMRNALLSHRDGAKVALGTGFTEKQYETQENSLAFLTQQGFSLENALYANQAVGIYTLGCVLLDQELQVAKEERETPTTDSMPPLVRQAFELADHQGAEPAFLFGLELIISGLEKQLKAESGS

SEQ ID NO: 1543 - protein, 207 aa, Artificial Sequence; identical to SEQ ID NO: 864
  synthetic construct; Sulfonylurea responsive repressor

SEQ ID NO: 1544 - protein, 207 aa, Artificial Sequence
  synthetic construct; Sulfonylurea responsive repressor
MARLDKSKVINSALELLNEVGIEGLTTRKLAQKLGVEQPTLYWHVKNKRALLDAMAIEMLDRHRTHYLPLEGESWQDFLRNRAKSMRNALLSHRDGAKVCLGTGFTEKQYETQENSLAFLTQQGFSLENALYANQAVGIYTLGCVLLDQELQVAKEERETPTTDSMPPLVRQAFELNDHQGAEPAFLFGLELLISGLEKQLKAESGS

SEQ ID NO: 1545 - protein, 207 aa, Artificial Sequence
  synthetic construct; Sulfonylurea responsive repressor
MARLDKSKVINSALELLNEVGIEGLTTRKLAQKLGVEQPTLYWHVKNKRALLDAMAIEMLDRHRIHYLPLEGESWQDFLRNRAKSMRNALLSHRDGAKVCLGTGFTEQQYETAENNLAFLTQQGFSLENALYANQAVGIYTLGCVLLVQELHVAKEERETPTTDSMPPLVRQAVELFDHQGAEPAFLFGLELIISGLEKQLKAESGS

SEQ ID NO: 1546 - protein, 207 aa, Artificial Sequence
  synthetic construct; Sulfonylurea responsive repressor
MARLDKSKVINSALELLNEVGIEGLTTRKLAQKLGVEQPTLYWHVKNKRALLDAMAIEMLDRHKTHYLPLEGESWQDFLRNRAKSMRNALLSHRDGAKVCLGTGFTEQQYETMENSLAFLTQQGFSLENALYAFQAVGIYTLGCVLLEQELQVAKEERETPTTDSMPPLVRQAVELADHQGAEPAFLFGLELIISGLEKQLKAESGS

SEQ ID NO: 1547 - protein, 207 aa, Artificial Sequence
  synthetic construct; Sulfonylurea responsive repressor
MARLDKSKVINSALELLNEVGIEGLTTRKLAQKLGVEQPTLYWHVKNKRALLDAMAIEMLDRHRTHYLPLEGESWQDFLRNRAKSMRNALLSHRDGAKVALGTGFTERQYETQENSLAFLTQQGFSLENALYANQAVGIYTLGCVLLDQELQVAKEERETPTTDSMPPLVRQAIELNDHQGAEPAFLFGLELIISGLEKQLKAESGS

SEQ ID NO: 1548 - protein, 207 aa, Artificial Sequence
  synthetic construct; Sulfonylurea responsive repressor
MARLDKSKVINSALELLNEVGIEGLTTRKLAQKLGVEQPTLYWHVKNKRALLDAMAIEMLDRHKIHYLPLEGESWQDFLRNRAKSMRNALLSHRDGAKVALGTGFTEKQYETQENNLAFLTQQGFSLENALYANQAVGIYTLGCVLLDQELQVAKEERETPTTDSMPPLVRQAFELNDHQGAEPAFLFGLELIISGLEKQLKAESGS

SEQ ID NO: 1549 - protein, 207 aa, Artificial Sequence
  synthetic construct; Sulfonylurea responsive repressor
MARLDKSKVINSALELLNEVGIEGLTTRKLAQKLGVEQPTLYWHVKNKRALLDAMAIEMLDRHKIHYLPLEGESWQDFLRNWAKSMRNALLSHRDGAKVALGTGFTEQQYETSENSLAFLTQQGFSLENALYAFQAVGIYTLGCVLLDQELQVAKEERETPITDSMPPLVRQAYELADHQGAEPAFLFGLELIISGLEKQLKADSGS

SEQ ID NO: 1550 - protein, 207 aa, Artificial Sequence
  synthetic construct; Sulfonylurea responsive repressor
MARLDKSKVINSALELLNEVGIEGLTTRKLAQKLGVEQPTLYWHVKNKRALLDAMAREMLDRHQTHYLPLEGESWQNFLRNKAKSMRNALLSHRDGAKVCLGTGFTERQYETSENWLAFLTQQGFSLENALYAFQAVGIYTLGCVLLDQELQVAKEERETPTTDSMPPLVRQAIELADHQGAEPAFLFGLELIISGLEKQLKAESGS

SEQ ID NO: 1551 - protein, 207 aa, Artificial Sequence
  synthetic construct; Sulfonylurea responsive repressor
  MISC_FEATURE (64)..(64)
  MISC_FEATURE (100)..(100)
  MISC_FEATURE (108)..(108)
  MISC_FEATURE (113)..(113)
MARLDKSKVINSALELLNEVGIEGLTTRKLAQKLGVEQPTLYWHVKNKRALLDAMAIEMLDRHXIHYLPLEGESWQNFLRNRAKSMRNALLSHRDGAKVXLGTGFTEXQYETXENSLAFLTQQGFSLENALYAMQAVGIYTLGCVLLDQELQVAKEERETPTTDSMPPLVRQAIELADHQGAEPAFLFGLELIISGLEKQLKAESGS

SEQ ID NO: 1552 - protein, 207 aa, Artificial Sequence; identical to SEQ ID NO: 1531
  synthetic construct; Sulfonylurea responsive repressor

SEQ ID NO: 1553 - protein, 207 aa, Artificial Sequence
  synthetic construct; Sulfonylurea responsive repressor
MARLDKSKVINSALELLNEVGIEGLTTRKLAQKLGVEQPTLYWHVKNKRALLDAMAIEMLDRHRIHYLPLEGESWQDFLRNKAKSMRNALLSHRDGAKVCLGTGFTEQQYETQENNLAFLTQQGFSLENALYANQAVGIYTLGCVLLDQELQVAKEERETPTTDSMPPLVRQAVELADHQGAEPAFLFGLELIISGLEKQLKAESGS

SEQ ID NO: 1554 - protein, 207 aa, Artificial Sequence
  synthetic construct; Sulfonylurea responsive repressor
MARLDKSKVINSALELLNEVGIEGLTTRKLAQKLGVEQPTLYWHVKNKRALLDAMAIEMLDRHKIHYLPLEGESWQNFLRNRAKSMRNALLSHRDGAKVCLGTGFTEQQYETQENNLAFLTQQGFSLENALYANQAVGIYTLSCVLLDQELQVAKEERETPTTDSMPPLVRQAFELADHQGAEPAFLFGLELIISGLEKQLKAESGS

SEQ ID NO: 1555 - protein, 207 aa, Artificial Sequence
  synthetic construct; Sulfonylurea responsive repressor
MARLDKSKVINSALELLNEVGIEGLTTRKLAQKLGVEQPTLYWHVKNKRALLDAMAIEMLDRHKIHYLPLEGESWQDFLRNKAKSMRNALLSHRDGAKVCLGTGFTEQQYETQENSLAFLTQQGFSLENALYANQAVGIYTLGCVLLDQELQVAKEERETPTTDSMPPLVRQAYELADHQGAEPAFLFGLELIISGLEKQLKAESGS

SEQ ID NO: 1556 - protein, 207 aa, Artificial Sequence
  synthetic construct; Sulfonylurea responsive repressor
MARLDKSKVINSALELLNEVGIEGLTTRKLAQKLGVEQPTLYWHVKNKRALLDAMAIEMLDRHQTHYLPLEGESWQNFLRNRAKSMRNALLSHRDGAKVCLGTGFTEKQYETQENSLAFLTQQGFSLENALYANQAVGIYTLGCVLLDQELQVAKEERETPTTDSMPPLVRQAIELADHQGAEPAFLFGLELIISGLEKQLKAESGS

SEQ ID NO: 1557 - protein, 207 aa, Artificial Sequence
  synthetic construct; Sulfonylurea responsive repressor
MARLDKSKVINSALELLNEVGIEGLTTRKLAQKLGVEQPTLYWHVKNKRALLDAMAIEMLDRHTTHYLPLEGESWQNFLRNWAKSMRNALLSHRDGAKVCLGTGFTEQQYETMENSLAFLTQQGFSLENALYAMQAVGIYTLGCVLLDQELQVAKEERETPTTDSMPPLVRQAVELADHQGAEPAFLFGLELIISGLEKQLKAESGS

SEQ ID NO: 1558 - protein, 207 aa, Artificial Sequence
  synthetic construct; Sulfonylurea responsive repressor
MARLDKSKVINSALELLNEVGIEGLTTRKLAQKLGVEQPTLYWHVKNKRALLDAMAIEMLGRHKTHYLPLEGESWQDFLRNWAKSMRNALLSHRDGAKVCLGTGFTEQQYETMENNLDFLTQQGFSLENALYAMQAVGIYTLGRVLLDQELQVAKEERETPTTDSMPPLVRQAFELFDHQGAEPAFLFGLELIISGLEKQLKAESGS

SEQ ID NO: 1559 - protein, 207 aa, Artificial Sequence
  synthetic construct; Sulfonylurea responsive repressor
MARLDKSKVINSALELLNEVGIEGLTTRKLAQKLGVEQPTLYWHVKNKRALLDAMAIEMLDRHQIHYLPLEGESWQNFLRNKAKSMRNALLSHRDGAKVCLGTGFTEQQYETMENSLAFLTQQGFSLENALYALQAVGIYTLGCVLLDQELQVAKEERETPTTDSMPPLVRQAIELADHQGAEPAFLFGLELIISGLEKQLKAESGS

SEQ ID NO: 1560 - protein, 207 aa, Artificial Sequence
  synthetic construct; Sulfonylurea responsive repressor
MARLDKSKVINSALELLNEVGIEGLTTRKLAQKLGVEQPTLYWHVKNKRALLDAMAREMLDRHKTHYLPLEGESWQNFLRNWAKSMRNALLSHRDGAKVCLGTGFTEQQYETAENNLAFLTQQGFSLEKALYAFQAVGIYTLGCVLLDQELQVAKEERETPTTDSMPPLVRQAFELFDHQGAEPAFLFGLELIISGLEKQLKAESGS

SEQ ID NO: 1561 - protein, 207 aa, Artificial Sequence
  synthetic construct; Sulfonylurea responsive repressor
MARLDKSKVINSALELLNEVGIEGLTTRKLAQKLGVEQPTLYWHVKNKRALLDAMAIEMLDRHTTHYLPLEGESWQNFLRNRAKSMRNALLSHRDGAKVALGTGFTEKQYETQENNLAFLTQQGFSLENALYANQAVGIYTLGCVLLDQELQVAKEERETPTTDSMPPLVRQAVELADHQGAEPAFLFGLELIISGLEKQLKAESGS

SEQ ID NO: 1562 - protein, 207 aa, Artificial Sequence
  synthetic construct; Sulfonylurea responsive repressor
MARLDKSKVINSALELLNEVGIEGLTTRKLAQKLGVEQPTLYWHVKNKRALLDAMAIEMLDRHKTHYLPLEGESWQDFLRNRAKSMRNALLSHRDGAKVCLGTGFTERQYETQENNLAFLTQQGFSLENALYANQAVGIYTLGCVLLDQELQVAKEERETPTTDSMPPLVRQAIELADHQGAEPAFLFGLELIISGLEKQLKAESGS

SEQ ID NO: 1563 - protein, 207 aa, Artificial Sequence
  synthetic construct; Sulfonylurea responsive repressor
MARLDKSKVINSALELLNEVGIEGLTTRKLAQKLGVEQPTLYWHVKNKRALLDAMAIEMLDRHKTHYLPLEGESWQDFLRNKAKSMRIALLSHRDGAKVCLGTGFTEKQYETAENTLAFLTQQGFSLENALYAFQAVGIYTLGCVLLDQELQVAKEERETPTTDSMPPLVRQAFELADHQGAEPAFLFGLELIISGLEKQLKAESGS

SEQ ID NO: 1564 - protein, 207 aa, Artificial Sequence
  synthetic construct; Sulfonylurea responsive repressor
MARLDKSKVINSALELLNEVGIEGLTTRKLAQKLGVEQPTLYWHVKNKRALLDAMAIEMLDRHRIHYLPLEGESWQDFLRNWAKSMRNALLSHRDGAKVCLGTGFTERQYETQENKLAFLTQQGFSLENALYANQAVGIYTLGCVLLDQELQVAKEERETPTTDSMPPLVRQAIELADHQGAEPAFLFGLELIISGLEKQLEAESGS

SEQ ID NO: 1565 - protein, 207 aa, Artificial Sequence
  synthetic construct; Sulfonylurea responsive repressor
MARLDKSKVINSALELLNEVGIEGLTTRKLAQKLGVEQPTLYWHVKNKRALLDAMAIEMLDRHRTHYLPLEGESWQDFLRNWAKSMRNALLSHRDGAKVCLGTGFTEQQYETSENKLAFLTQQGFSLENALYVFQAVGIYTLGCALLDQELQVAKEERETPTTDSMPPLVRQAVELFDHQGAEPAFLFGLELIISGLEKQLKAESGS

SEQ ID NO: 1566 - protein, 207 aa, Artificial Sequence
  synthetic construct; Sulfonylurea responsive repressor
MARLDKSKVINSALELLNEVGIEGLTTRKLAQKLGVEQPTLYWHVKNKRALLDAMAIEMLDPHRIHYLPLEGESWQNFLRNWAKSMRNALLSHRDGAKVCLGTGFTEQQYETMENSLAFLTQQGFSLENALYAMQAVGIYTLGCVLLDQELQVAKEERETPTTDSMPPLVRQAVELADHQGAEPAFLFGLELIISGLEKQLKAESGS

SEQ ID NO: 1567 - protein, 207 aa, Artificial Sequence
  synthetic construct; Sulfonylurea responsive repressor
MARLDKSKVINSALELLNEVGIEGLTTRKLAQKLGVEQPTLYWHVKNKRALLDAMAIEMLDRHQTHYLPLEGESWQDFLRNNAKSMRNALLSHRDGAKVALGTGFTERQYETQENKLAFLTQQGFSLENALYANQAVGIYTLGCVLLDQELQVAKEERETPTTDSMPPLVRQAVELADHQGAEPAFLFGLELIISGLEKQLKAESGS

SEQ ID NO: 1568 - protein, 207 aa, Artificial Sequence
  synthetic construct; Sulfonylurea responsive repressor
MARLDKSKVINSALELLNEVGIEGLTTRKLAQKLGVEQPTLYWHVKNKRALLDAMAIEMLDRHKIHYLPLEGESWQDFLRNKAKSMRNALLSHRDGAKVCLGTGFTEQQYETQENNLAFLTQQGFSLENALYAMQAVGIYTLGYVLLDQELQVAKEERETPTTDSMPPLVRQAIELADHQGAEPAFLFGLELIISGLEKQLKAESES

SEQ ID NO: 1569 - DNA, 42 bp, Artificial Sequence
  synthetic construct; oligonucleotide
tattggcatgtaaaaaataagcgagctctgctcgacgcctta

SEQ ID NO: 1570 - DNA, 42 bp, Artificial Sequence
  synthetic construct; oligonucleotide
gccattgagatgwtggataggcaccasactcacttttgccct

SEQ ID NO: 1571 - DNA, 42 bp, Artificial Sequence
  synthetic construct; oligonucleotide
gccattgagatgwtggataggcacgcaactcacttttgccct

SEQ ID NO: 1572 - DNA, 42 bp, Artificial Sequence
  synthetic construct; oligonucleotide
ttagaaggggaaagctggcaagattttttacgtaatamtgct

SEQ ID NO: 1573 - DNA, 42 bp, Artificial Sequence
  synthetic construct; oligonucleotide
aaaagttacagatgtgctttactaagtcatcgcgatggagca

SEQ ID NO: 1574 - DNA, 42 bp, Artificial Sequence
  synthetic construct; oligonucleotide
aaaagtatgagatgtgctttactaagtcatcgcgatggagca

SEQ ID NO: 1575 - DNA, 42 bp, Artificial Sequence
  synthetic construct; oligonucleotide
aaagtatrtttaggtacacgcdtcacagaaaaacagtatgaa

SEQ ID NO: 1576 - DNA, 42 bp, Artificial Sequence
  synthetic construct; oligonucleotide
aaagtatrtttaggtacacgctggacagaaaaacagtatgaa

SEQ ID NO: 1577 - DNA, 42 bp, Artificial Sequence
  synthetic construct; oligonucleotide
aaagtatrtttaggtacagstdtcacagaaaaacagtatgaa

SEQ ID NO: 1578 - DNA, 42 bp, Artificial Sequence
  synthetic construct; oligonucleotide
aaagtatrtttaggtacagsttggacagaaaaacagtatgaa

SEQ ID NO: 1579 - DNA, 42 bp, Artificial Sequence
  synthetic construct; oligonucleotide
aaagtatggttaggtacacgcdtcacagaaaaacagtatgaa

SEQ ID NO: 1580 - DNA, 42 bp, Artificial Sequence
  synthetic construct; oligonucleotide
aaagtatggttaggtacacgctggacagaaaaacagtatgaa

SEQ ID NO: 1581 - DNA, 42 bp, Artificial Sequence
  synthetic construct; oligonucleotide
aaagtatggttaggtacagstdtcacagaaaaacagtatgaa

SEQ ID NO: 1582 - DNA, 42 bp, Artificial Sequence
  synthetic construct; oligonucleotide
aaagtatggttaggtacagsttggacagaaaaacagtatgaa

SEQ ID NO: 1583 - DNA, 42 bp, Artificial Sequence
  synthetic construct; oligonucleotide
actaaagaaaatarcttagcctttttatgccaacaaggtttt

SEQ ID NO: 1584 - DNA, 42 bp, Artificial Sequence
  synthetic construct; oligonucleotide
actaaagaaaatcaattagcctttttatgccaacaaggtttt

SEQ ID NO: 1585 - DNA, 42 bp, Artificial Sequence
  synthetic construct; oligonucleotide
actaaagaaaatatgttagcctttttatgccaacaaggtttt

SEQ ID NO: 1586 - DNA, 42 bp, Artificial Sequence
  synthetic construct; oligonucleotide
actsctgaaaatarcttagcctttttatgccaacaaggtttt

SEQ ID NO: 1587 - DNA, 42 bp, Artificial Sequence
  synthetic construct; oligonucleotide
actsctgaaaatcaattagcctttttatgccaacaaggtttt

SEQ ID NO: 1588 - DNA, 42 bp, Artificial Sequence
  synthetic construct; oligonucleotide
actsctgaaaatatgttagcctttttatgccaacaaggtttt

SEQ ID NO: 1589 - DNA, 42 bp, Artificial Sequence
  synthetic construct; oligonucleotide
tcactagagaatgcattatatgcartgagtgctgtggctawt

SEQ ID NO: 1590 - DNA, 42 bp, Artificial Sequence
  synthetic construct; oligonucleotide
tcactagagaatgcattatatgcartgagtgctgtggctgkt

SEQ ID NO: 1591 - DNA, 42 bp, Artificial Sequence
  synthetic construct; oligonucleotide
tcactagagaatgcattatatgcartgagtgctgtgygcawt

SEQ ID NO: 1592 - DNA, 42 bp, Artificial Sequence
  synthetic construct; oligonucleotide
tcactagagaatgcattatatgcartgagtgctgtgygcgkt

SEQ ID NO: 1593 - DNA, 42 bp, Artificial Sequence
  synthetic construct; oligonucleotide
tcactagagaatgcattatatgcartgmaagctgtggctawt

SEQ ID NO: 1594 - DNA, 42 bp, Artificial Sequence
  synthetic construct; oligonucleotide
tcactagagaatgcattatatgcartgmaagctgtggctgkt

SEQ ID NO: 1595 - DNA, 42 bp, Artificial Sequence
  synthetic construct; oligonucleotide
tcactagagaatgcattatatgcartgmaagctgtgygcawt

SEQ ID NO: 1596 - DNA, 42 bp, Artificial Sequence
  synthetic construct; oligonucleotide
tcactagagaatgcattatatgcartgmaagctgtgygcgkt

SEQ ID NO: 1597 - DNA, 42 bp, Artificial Sequence
  synthetic construct; oligonucleotide
tcactagagaatgcattatatgcawggagtgctgtggctawt

SEQ ID NO: 1598 - DNA, 42 bp, Artificial Sequence
  synthetic construct; oligonucleotide
tcactagagaatgcattatatgcawggagtgctgtggctgkt

SEQ ID NO: 1599 - DNA, 42 bp, Artificial Sequence
  synthetic construct; oligonucleotide
tcactagagaatgcattatatgcawggagtgctgtgygcawt

SEQ ID NO: 1600 - DNA, 42 bp, Artificial Sequence
  synthetic construct; oligonucleotide
tcactagagaatgcattatatgcawggagtgctgtgygcgkt

SEQ ID NO: 1601 - DNA, 42 bp, Artificial Sequence
  synthetic construct; oligonucleotide
tcactagagaatgcattatatgcawggmaagctgtggctawt

SEQ ID NO: 1602 - DNA, 42 bp, Artificial Sequence
  synthetic construct; oligonucleotide
tcactagagaatgcattatatgcawggmaagctgtggctgkt

SEQ ID NO: 1603 - DNA, 42 bp, Artificial Sequence
  synthetic construct; oligonucleotide
tcactagagaatgcattatatgcawggmaagctgtgygcawt

SEQ ID NO: 1604 - DNA, 42 bp, Artificial Sequence
  synthetic construct; oligonucleotide
tcactagagaatgcattatatgcawggmaagctgtgygcgkt

SEQ ID NO: 1605 - DNA, 42 bp, Artificial Sequence
  synthetic construct; oligonucleotide
tttactttaggttgcgtattgtkggatcaagagagmcaagtc

SEQ ID NO: 1606 - DNA, 42 bp, Artificial Sequence
  synthetic construct; oligonucleotide
tttactttaggttgcgtattgtkggatcaagagmtgcaagtc

SEQ ID NO: 1607 - DNA, 42 bp, Artificial Sequence
  synthetic construct; oligonucleotide
tttactttaggttgcgtattgtytgatcaagagagmcaagtc

SEQ ID NO: 1608 - DNA, 42 bp, Artificial Sequence
  synthetic construct; oligonucleotide
tttactttaggttgcgtattgtytgatcaagagmtgcaagtc

SEQ ID NO: 1609 - DNA, 42 bp, Artificial Sequence
  synthetic construct; oligonucleotide
gctaaagaagaaagggaaacacctactactgmtagtatgccg

SEQ ID NO: 1610 - DNA, 42 bp, Artificial Sequence
  synthetic construct; oligonucleotide
ccattattacgacaagctagtgaattattggatcaccaaggt

SEQ ID NO: 1611 - DNA, 42 bp, Artificial Sequence
  synthetic construct; oligonucleotide
ccattattacgacaagctagtgaattakcagatcaccaaggt

SEQ ID NO: 1612 - DNA, 42 bp, Artificial Sequence
  synthetic construct; oligonucleotide
ccattattacgacaagctagtgaattaaaggatcaccaaggt

SEQ ID NO: 1613 - DNA, 42 bp, Artificial Sequence
  synthetic construct; oligonucleotide
ccattattacgacaagcttkggaattattggatcaccaaggt

SEQ ID NO: 1614 - DNA, 42 bp, Artificial Sequence
  synthetic construct; oligonucleotide
ccattattacgacaagcttkggaattakcagatcaccaaggt

SEQ ID NO: 1615 - DNA, 42 bp, Artificial Sequence
  synthetic construct; oligonucleotide
ccattattacgacaagcttkggaattaaaggatcaccaaggt

SEQ ID NO: 1616 - DNA, 42 bp, Artificial Sequence
  synthetic construct; oligonucleotide
ccattattacgacaagctgtagaattattggatcaccaaggt

SEQ ID NO: 1617 - DNA, 42 bp, Artificial Sequence
  synthetic construct; oligonucleotide
ccattattacgacaagctgtagaattakcagatcaccaaggt

SEQ ID NO: 1618 - DNA, 42 bp, Artificial Sequence
  synthetic construct; oligonucleotide
ccattattacgacaagctgtagaattaaaggatcaccaaggt

SEQ ID NO: 1619 - DNA, 42 bp, Artificial Sequence
  synthetic construct; oligonucleotide
gcagagccagccttcttattcggccttgaattgatcatatgc

SEQ ID NO: 1620 - DNA, 39 bp, Artificial Sequence
  synthetic construct; oligonucleotide
ggattagaaaaacaacttaaatscgaaagtgggtcttaa

SEQ ID NO: 1621 - DNA, 42 bp, Artificial Sequence
  synthetic construct; oligonucleotide
cctatccawcatctcaatggctaaggcgtcgagcagagctcg

SEQ ID NO: 1622 - DNA, 42 bp, Artificial Sequence
  synthetic construct; oligonucleotide
ttgccagctttccccttctaaagggcaaaagtgagtstggtg

SEQ ID NO: 1623 - DNA, 42 bp, Artificial Sequence
  synthetic construct; oligonucleotide
ttgccagctttccccttctaaagggcaaaagtgagttgcgtg

SEQ ID NO: 1624 - DNA, 42 bp, Artificial Sequence
  synthetic construct; oligonucleotide
taaagcacatctgtaacttttagcaktattacgtaaaaaatc

SEQ ID NO: 1625 - DNA, 42 bp, Artificial Sequence
  synthetic construct; oligonucleotide
taaagcacatctcatacttttagcaktattacgtaaaaaatc

SEQ ID NO: 1626 - DNA, 42 bp, Artificial Sequence
  synthetic construct; oligonucleotide
gcgtgtacctaaayatacttttgctccatcgcgatgacttag

SEQ ID NO: 1627 - DNA, 42 bp, Artificial Sequence
  synthetic construct; oligonucleotide
asctgtacctaaayatacttttgctccatcgcgatgacttag

SEQ ID NO: 1628 - DNA, 42 bp, Artificial Sequence
  synthetic construct; oligonucleotide
gcgtgtacctaaccatacttttgctccatcgcgatgacttag

SEQ ID NO: 1629 - DNA, 42 bp, Artificial Sequence
  synthetic construct; oligonucleotide
asctgtacctaaccatacttttgctccatcgcgatgacttag

SEQ ID NO: 1630 - DNA, 42 bp, Artificial Sequence
  synthetic construct; oligonucleotide
ggctaagytattttctttagtttcatactgtttttctgtgah

SEQ ID NO: 1631 - DNA, 42 bp, Artificial Sequence
  synthetic construct; oligonucleotide
ggctaattgattttctttagtttcatactgtttttctgtgah

SEQ ID NO: 1632 - DNA, 42 bp, Artificial Sequence
  synthetic construct; oligonucleotide
ggctaacatattttctttagtttcatactgtttttctgtgah

SEQ ID NO: 1633 - DNA, 42 bp, Artificial Sequence
  synthetic construct; oligonucleotide
ggctaagytattttcagsagtttcatactgtttttctgtgah

SEQ ID NO: 1634 - DNA, 42 bp, Artificial Sequence
  synthetic construct; oligonucleotide
ggctaattgattttcagsagtttcatactgtttttctgtgah

SEQ ID NO: 1635 - DNA, 42 bp, Artificial Sequence
  synthetic construct; oligonucleotide
ggctaacatattttcagsagtttcatactgtttttctgtgah

SEQ ID NO: 1636 - DNA, 42 bp, Artificial Sequence
  synthetic construct; oligonucleotide
ggctaagytattttctttagtttcatactgtttttctgtcca

SEQ ID NO: 1637 - DNA, 42 bp, Artificial Sequence
  synthetic construct; oligonucleotide
ggctaattgattttctttagtttcatactgtttttctgtcca

SEQ ID NO: 1638 - DNA, 42 bp, Artificial Sequence
  synthetic construct; oligonucleotide
ggctaacatattttctttagtttcatactgtttttctgtcca

SEQ ID NO: 1639 - DNA, 42 bp, Artificial Sequence
  synthetic construct; oligonucleotide
ggctaagytattttcagsagtttcatactgtttttctgtcca

SEQ ID NO: 1640 - DNA, 42 bp, Artificial Sequence
  synthetic construct; oligonucleotide
ggctaattgattttcagsagtttcatactgtttttctgtcca

SEQ ID NO: 1641 - DNA, 42 bp, Artificial Sequence
  synthetic construct; oligonucleotide
ggctaacatattttcagsagtttcatactgtttttctgtcca

SEQ ID NO: 1642 - DNA, 42 bp, Artificial Sequence
  synthetic construct; oligonucleotide
atataatgcattctctagtgaaaaaccttgttggcataaaaa

SEQ ID NO: 1643 - DNA, 42 bp, Artificial Sequence
  synthetic construct; oligonucleotide
caatacgcaacctaaagtaaaawtagccacagcactcaytgc

SEQ ID NO: 1644 - DNA, 42 bp, Artificial Sequence
  synthetic construct; oligonucleotide
caatacgcaacctaaagtaaaamcagccacagcactcaytgc

SEQ ID NO: 1645 - DNA, 42 bp, Artificial Sequence
  synthetic construct; oligonucleotide
caatacgcaacctaaagtaaaawtgcrcacagcactcaytgc

SEQ ID NO: 1646 - DNA, 42 bp, Artificial Sequence
  synthetic construct; oligonucleotide
caatacgcaacctaaagtaaaamcgcrcacagcactcaytgc

SEQ ID NO: 1647 - DNA, 42 bp, Artificial Sequence
  synthetic construct; oligonucleotide
caatacgcaacctaaagtaaaawtagccacagcttkcaytgc

SEQ ID NO: 1648 - DNA, 42 bp, Artificial Sequence
  synthetic construct; oligonucleotide
caatacgcaacctaaagtaaaamcagccacagcttkcaytgc

SEQ ID NO: 1649 - DNA, 42 bp, Artificial Sequence
  synthetic construct; oligonucleotide
caatacgcaacctaaagtaaaawtgcrcacagcttkcaytgc

SEQ ID NO: 1650 - DNA, 42 bp, Artificial Sequence
  synthetic construct; oligonucleotide
caatacgcaacctaaagtaaaamcgcrcacagcttkcaytgc

SEQ ID NO: 1651 - DNA, 42 bp, Artificial Sequence
  synthetic construct; oligonucleotide
caatacgcaacctaaagtaaaawtagccacagcactccwtgc

SEQ ID NO: 1652 - DNA, 42 bp, Artificial Sequence
  synthetic construct; oligonucleotide
caatacgcaacctaaagtaaaamcagccacagcactccwtgc

SEQ ID NO: 1653 - DNA, 42 bp, Artificial Sequence
  synthetic construct; oligonucleotide
caatacgcaacctaaagtaaaawtgcrcacagcactccwtgc

SEQ ID NO: 1654 - DNA, 42 bp, Artificial Sequence
  synthetic construct; oligonucleotide
caatacgcaacctaaagtaaaamcgcrcacagcactccwtgc

SEQ ID NO: 1655 - DNA, 42 bp, Artificial Sequence
  synthetic construct; oligonucleotide
caatacgcaacctaaagtaaaawtagccacagcttkccwtgc

SEQ ID NO: 1656 - DNA, 42 bp, Artificial Sequence
  synthetic construct; oligonucleotide
caatacgcaacctaaagtaaaamcagccacagcttkccwtgc

SEQ ID NO: 1657 - DNA, 42 bp, Artificial Sequence
  synthetic construct; oligonucleotide
caatacgcaacctaaagtaaaawtgcrcacagcttkccwtgc

SEQ ID NO: 1658 - DNA, 42 bp, Artificial Sequence
  synthetic construct; oligonucleotide
caatacgcaacctaaagtaaaamcgcrcacagcttkccwtgc

SEQ ID NO: 1659 - DNA, 42 bp, Artificial Sequence
  synthetic construct; oligonucleotide
tgtttccctttcttctttagcgacttgkctctcttgatccma

SEQ ID NO: 1660 - DNA, 42 bp, Artificial Sequence
  synthetic construct; oligonucleotide
tgtttccctttcttctttagcgacttgcakctcttgatccma

SEQ ID NO: 1661 - DNA, 42 bp, Artificial Sequence
  synthetic construct; oligonucleotide
tgtttccctttcttctttagcgacttgkctctcttgatcara

SEQ ID NO: 1662 - DNA, 42 bp, Artificial Sequence
  synthetic construct; oligonucleotide
tgtttccctttcttctttagcgacttgcakctcttgatcara

SEQ ID NO: 1663 - DNA, 42 bp, Artificial Sequence
  synthetic construct; oligonucleotide
actagcttgtcgtaataatggcggcatactakcagtagtagg

SEQ ID NO: 1664 - DNA, 42 bp, Artificial Sequence
  synthetic construct; oligonucleotide
cmaagcttgtcgtaataatggcggcatactakcagtagtagg

SEQ ID NO: 1665 - DNA, 42 bp, Artificial Sequence
  synthetic construct; oligonucleotide
tacagcttgtcgtaataatggcggcatactakcagtagtagg

SEQ ID NO: 1666 - DNA, 42 bp, Artificial Sequence
  synthetic construct; oligonucleotide
gaataagaaggctggctctgcaccttggtgatccaataattc

SEQ ID NO: 1667 - DNA, 42 bp, Artificial Sequence
  synthetic construct; oligonucleotide
gaataagaaggctggctctgcaccttggtgatctgmtaattc

SEQ ID NO: 1668 - DNA, 42 bp, Artificial Sequence
  synthetic construct; oligonucleotide
gaataagaaggctggctctgcaccttggtgatcctttaattc

SEQ ID NO: 1669 - DNA, 42 bp, Artificial Sequence
  synthetic construct; oligonucleotide
tttaagttgtttttctaatccgcatatgatcaattcaaggcc

SEQ ID NO: 1670 - DNA, 35 bp, Artificial Sequence
  synthetic construct; oligonucleotide
gggaacttcggcgcgccttaagacccactttcgsa

SEQ ID NO: 1671 - DNA, 42 bp, Artificial Sequence; identical to SEQ ID NO: 1569
  synthetic construct; oligonucleotide

SEQ ID NO: 1672 - DNA, 42 bp, Artificial Sequence; identical to SEQ ID NO: 1619
  synthetic construct; oligonucleotide

SEQ ID NO: 1673 - DNA, 42 bp, Artificial Sequence; identical to SEQ ID NO: 1642
  synthetic construct; oligonucleotide

SEQ ID NO: 1674 - DNA, 42 bp, Artificial Sequence; identical to SEQ ID NO: 1669
  synthetic construct; oligonucleotide

SEQ ID NO: 1675 - DNA, 42 bp, Artificial Sequence; identical to SEQ ID NO: 1572
  synthetic construct; oligonucleotide

SEQ ID NO: 1676 - DNA, 42 bp, Artificial Sequence; identical to SEQ ID NO: 1625
  synthetic construct; oligonucleotide

SEQ ID NO: 1677 - DNA, 42 bp, Artificial Sequence
  synthetic construct; oligonucleotide
ttgccagctttccccttctaaagggcamahgtgagttgcgtg

SEQ ID NO: 1678 - DNA, 42 bp, Artificial Sequence
  synthetic construct; oligonucleotide
ttgccagctttccccttctaaagggcaatagtgagttgcgtg

SEQ ID NO: 1679 - DNA, 42 bp, Artificial Sequence; identical to SEQ ID NO: 1668
  synthetic construct; oligonucleotide

SEQ ID NO: 1680 - DNA, 42 bp, Artificial Sequence
  synthetic construct; oligonucleotide
gccattgagatgatggataggcacgcaactcactattgccct

SEQ ID NO: 1681 - DNA, 42 bp, Artificial Sequence
  synthetic construct; oligonucleotide
rstgctgaaaatatgttagcctttttatgccaacaaggtttt

SEQ ID NO: 1682 - DNA, 42 bp, Artificial Sequence
  synthetic construct; oligonucleotide
tttactttaggttgcgtattgtttgatcaagagctccaagtc

SEQ ID NO: 1683 - DNA, 42 bp, Artificial Sequence
  synthetic construct; oligonucleotide
tgtttccctttcttctttagcgacttggagctcttgatcaaa

SEQ ID NO: 1684 - DNA, 42 bp, Artificial Sequence
  synthetic construct; oligonucleotide
gccattgagatgatggataggcacgcaactcacdtktgccct

SEQ ID NO: 1685 - DNA, 42 bp, Artificial Sequence
  synthetic construct; oligonucleotide
gccattgagatgatggataggcaccaaactcacdtktgccct

SEQ ID NO: 1686 - DNA, 42 bp, Artificial Sequence
  synthetic construct; oligonucleotide
gccattgagatgatggataggcaccaaactcactattgccct

SEQ ID NO: 1687 - DNA, 42 bp, Artificial Sequence
  synthetic construct; oligonucleotide
aaaagtatgagatgtgctttactaagccatcgcgatggagca

SEQ ID NO: 1688 - DNA, 42 bp, Artificial Sequence
  synthetic construct; oligonucleotide
aaagtatgkttaggtacacgctggacagaamaacawtatgaa

SEQ ID NO: 1689 - DNA, 42 bp, Artificial Sequence
  synthetic construct; oligonucleotide
aaagtatgkttaggtacacgctggacagaamaawtgtatgaa

SEQ ID NO: 1690 - DNA, 42 bp, Artificial Sequence
  synthetic construct; oligonucleotide
rstgctgaaaatcaattagcctttttatgccaacaaggtttt

SEQ ID NO: 1691 - DNA, 42 bp, Artificial Sequence
  synthetic construct; oligonucleotide
tcactagagaatgcattatatgcartgagtgcgtggrgggtg

SEQ ID NO: 1692 - DNA, 42 bp, Artificial Sequence
  synthetic construct; oligonucleotide
tcactagagaatgcattatatgcartgagtgcgtggrggaac

SEQ ID NO: 1693 - DNA, 42 bp, Artificial Sequence
  synthetic construct; oligonucleotide
tttactttaggttgcgtattgtttgatcaagagagccaagtc

SEQ ID NO: 1694 - DNA, 42 bp, Artificial Sequence
  synthetic construct; oligonucleotide
gctaaagaagaaagggaaacacctactactgctagtatgccg

SEQ ID NO: 1695 - DNA, 42 bp, Artificial Sequence
  synthetic construct; oligonucleotide
ccattaktgcgacaagbttkggaattaaaggatcaccaaggt

SEQ ID NO: 1696 - DNA, 42 bp, Artificial Sequence
  synthetic construct; oligonucleotide
ccattagcccgacaagbttkggaattaaaggatcaccaaggt

SEQ ID NO: 1697 - DNA, 39 bp, Artificial Sequence
  synthetic construct; oligonucleotide
ggattagaaaaacaacttaaatgcgaaagtgggtcttaa

SEQ ID NO: 1698 - DNA, 42 bp, Artificial Sequence
  synthetic construct; oligonucleotide
cctatccatcatctcaatggctaaggcgtcgagcagagctcg

SEQ ID NO: 1699 - DNA, 42 bp, Artificial Sequence
  synthetic construct; oligonucleotide
ttgccagctttccccttctaaagggcamahgtgagtttggtg

SEQ ID NO: 1700 - DNA, 42 bp, Artificial Sequence
  synthetic construct; oligonucleotide
ttgccagctttccccttctaaagggcaatagtgagtttggtg

SEQ ID NO: 1701 - DNA, 42 bp, Artificial Sequence
  synthetic construct; oligonucleotide
gcgtgtacctaamcatacttttgctccatcgcgatggcttag

SEQ ID NO: 1702 - DNA, 42 bp, Artificial Sequence
  synthetic construct; oligonucleotide
ggctaacatattttcagcasyttcatawtgttkttctgtcca

SEQ ID NO: 1703 - DNA, 42 bp, Artificial Sequence
  synthetic construct; oligonucleotide
ggctaattgattttcagcasyttcatawtgttkttctgtcca

SEQ ID NO: 1704 - DNA, 42 bp, Artificial Sequence
  synthetic construct; oligonucleotide
ggctaacatattttcagcasyttcatacawttkttctgtcca

SEQ ID NO: 1705 - DNA, 42 bp, Artificial Sequence
  synthetic construct; oligonucleotide
ggctaattgattttcagcasyttcatacawttkttctgtcca

SEQ ID NO: 1706 - DNA, 42 bp, Artificial Sequence
  synthetic construct; oligonucleotide
caatacgcaacctaaagtaaacacccycacagcactcaytgc

SEQ ID NO: 1707 - DNA, 42 bp, Artificial Sequence
  synthetic construct; oligonucleotide
caatacgcaacctaaagtaaagttccycacagcactcaytgc

SEQ ID NO: 1708 - DNA, 42 bp, Artificial Sequence
  synthetic construct; oligonucleotide
tgtttccctttcttctttagcgacttggctctcttgatcaaa

SEQ ID NO: 1709 - DNA, 42 bp, Artificial Sequence
  synthetic construct; oligonucleotide
cmaavcttgtcgcamtaatggcggcatactagcagtagtagg

SEQ ID NO: 1710 - DNA, 42 bp, Artificial Sequence
  synthetic construct; oligonucleotide
cmaavcttgtcgggctaatggcggcatactagcagtagtagg

SEQ ID NO: 1711 - DNA, 35 bp, Artificial Sequence
  synthetic construct; oligonucleotide
gggaacttcggcgcgccttaagacccactttcgca

SEQ ID NO: 1712 - DNA, 40 bp, Artificial Sequence
  synthetic construct; oligonucleotide
cacacaggaatccatggccagactcgacaagagcaaggtg

SEQ ID NO: 1713 - DNA, 42 bp, Artificial Sequence
  synthetic construct; oligonucleotide
atcaacagcgcactggagctgctgaacgaggtcggaatcgaa

SEQ ID NO: 1714 - DNA, 42 bp, Artificial Sequence
  synthetic construct; oligonucleotide
ggcctcacaacccgtaaactcgcccagaagctcggggtagag

SEQ ID NO: 1715 - DNA, 42 bp, Artificial Sequence
  synthetic construct; oligonucleotide
cagcctacattgtattggcacgtcaagaacaagcgagctctg

SEQ ID NO: 1716 - DNA, 42 bp, Artificial Sequence
  synthetic construct; oligonucleotide
ctagacgccwtggccattgagatgwtggataggcaccawacc

SEQ ID NO: 1717 - DNA, 42 bp, Artificial Sequence
  synthetic construct; oligonucleotide
ctagacgccwtggccattgagatgwtggataggcacvttacc

SEQ ID NO: 1718 - DNA, 42 bp, Artificial Sequence
  synthetic construct; oligonucleotide
cactactgccctttggaaggggaaagctggcaagacttcttg

SEQ ID NO: 1719 - DNA, 42 bp, Artificial Sequence
  synthetic construct; oligonucleotide
aggaacaacgctaagagcwtsagatgtgctttgctcagtcac

SEQ ID NO: 1720 - DNA, 42 bp, Artificial Sequence
  synthetic construct; oligonucleotide
aggaacaacgctaagagctggagatgtgctttgctcagtcac

SEQ ID NO: 1721 - DNA, 42 bp, Artificial Sequence
  synthetic construct; oligonucleotide
aggaacaacgctaagagctacagatgtgctttgctcagtcac

SEQ ID NO: 1722 - DNA, 42 bp, Artificial Sequence
  synthetic construct; oligonucleotide
aggaacvttgctaagagcwtsagatgtgctttgctcagtcac

SEQ ID NO: 1723 - DNA, 42 bp, Artificial Sequence
  synthetic construct; oligonucleotide
aggaacvttgctaagagctggagatgtgctttgctcagtcac

SEQ ID NO: 1724 - DNA, 42 bp, Artificial Sequence
  synthetic construct; oligonucleotide
aggaacvttgctaagagctacagatgtgctttgctcagtcac

SEQ ID NO: 1725 - DNA, 42 bp, Artificial Sequence
  synthetic construct; oligonucleotide
cgtgatggagccaaggtctgsctaggtacagcgtkgacggag

SEQ ID NO: 1726 - DNA, 42 bp, Artificial Sequence
  synthetic construct; oligonucleotide
cgtgatggagccaaggtctgsctaggtacagcgtwcacggag

SEQ ID NO: 1727 - DNA, 42 bp, Artificial Sequence
  synthetic construct; oligonucleotide
cgtgatggagccaaggtctgsctaggtacasggtkgacggag

SEQ ID NO: 1728 - DNA, 42 bp, Artificial Sequence
  synthetic construct; oligonucleotide
cgtgatggagccaaggtctgsctaggtacasggtwcacggag

SEQ ID NO: 1729 - DNA, 42 bp, Artificial Sequence
  synthetic construct; oligonucleotide
cgtgatggagccaaggtcrtgctaggtacagcgtkgacggag

SEQ ID NO: 1730 - DNA, 42 bp, Artificial Sequence
  synthetic construct; oligonucleotide
cgtgatggagccaaggtcrtgctaggtacagcgtwcacggag

SEQ ID NO: 1731 - DNA, 42 bp, Artificial Sequence
  synthetic construct; oligonucleotide
cgtgatggagccaaggtcrtgctaggtacasggtkgacggag

SEQ ID NO: 1732 - DNA, 42 bp, Artificial Sequence
  synthetic construct; oligonucleotide
cgtgatggagccaaggtcrtgctaggtacasggtwcacggag

SEQ ID NO: 1733 - DNA, 42 bp, Artificial Sequence
  synthetic construct; oligonucleotide
caacagtatgaawctgyggagaacatgwtggccttcctgtgc

SEQ ID NO: 1734 - DNA, 42 bp, Artificial Sequence
  synthetic construct; oligonucleotide
caacaaggtttctcccttgagaatgccwtgtacgcavtcdcg

SEQ ID NO: 1735 - DNA, 42 bp, Artificial Sequence
  synthetic construct; oligonucleotide
caacaaggtttctcccttgagaatgccwtgtacgcavtcmag

SEQ ID NO: 1736 - DNA, 42 bp, Artificial Sequence
  synthetic construct; oligonucleotide
caacaaggtttctcccttgagaatgccwtgtacgcavtcygc

SEQ ID NO: 1737 - DNA, 42 bp, Artificial Sequence
  synthetic construct; oligonucleotide
caacaaggtttctcccttgagaatgccwtgtacgcavtcgam

SEQ ID NO: 1738 - DNA, 42 bp, Artificial Sequence
  synthetic construct; oligonucleotide
gctgygcggrttttcactctgggttgcgtattgbkggatcaa

SEQ ID NO: 1739 - DNA, 42 bp, Artificial Sequence
  synthetic construct; oligonucleotide
gctgygcggrttttcactctgggttgcgtattgaaggatcaa

SEQ ID NO: 1740 - DNA, 42 bp, Artificial Sequence
  synthetic construct; oligonucleotide
gctgygcggrttttcactctgggttgcgtattgtktgatcaa

SEQ ID NO: 1741 - DNA, 42 bp, Artificial Sequence
  synthetic construct; oligonucleotide
gagtcccaagtcgctaaggaggagagggaaacacctactact

SEQ ID NO: 1742 - DNA, 42 bp, Artificial Sequence
  synthetic construct; oligonucleotide
gatagtatgccgccactgmttcgacaagcttgggaactcmaa

SEQ ID NO: 1743 - DNA, 42 bp, Artificial Sequence
  synthetic construct; oligonucleotide
gatcaccaaggtgcagagccagccttcctgttcggccttgaa

SEQ ID NO: 1744 - DNA, 42 bp, Artificial Sequence
  synthetic construct; oligonucleotide
ttgatcatatgcggattggagaagcagctgaagtgtgaaagt

SEQ ID NO: 1745 - DNA, 26 bp, Artificial Sequence
  synthetic construct; oligonucleotide
gggtcttaaggcgcgccgaagttccc

SEQ ID NO: 1746 - DNA, 42 bp, Artificial Sequence
  synthetic construct; oligonucleotide
cagctccagtgcgctgttgatcaccttgctcttgtcgagtct

SEQ ID NO: 1747 - DNA, 42 bp, Artificial Sequence
  synthetic construct; oligonucleotide
gagtttacgggttgtgaggccttcgattccgacctcgttcag

SEQ ID NO: 1748 - DNA, 42 bp, Artificial Sequence
  synthetic construct; oligonucleotide
gtgccaatacaatgtaggctgctctaccccgagcttctgggc

SEQ ID NO: 1749 - DNA, 42 bp, Artificial Sequence
  synthetic construct; oligonucleotide
ctcaatggccawggcgtctagcagagctcgcttgttcttgac

SEQ ID NO: 1750 - DNA, 42 bp, Artificial Sequence
  synthetic construct; oligonucleotide
cccttccaaagggcagtagtgggtwtggtgcctatccawcat

SEQ ID NO: 1751 - DNA, 42 bp, Artificial Sequence
  synthetic construct; oligonucleotide
cccttccaaagggcagtagtgggtaabgtgcctatccawcat

SEQ ID NO: 1752 - DNA, 42 bp, Artificial Sequence
  synthetic construct; oligonucleotide
sawgctcttagcgttgttcctcaagaagtcttgccagctttc

SEQ ID NO: 1753 - DNA, 42 bp, Artificial Sequence
  synthetic construct; oligonucleotide
ccagctcttagcgttgttcctcaagaagtcttgccagctttc

SEQ ID NO: 1754 - DNA, 42 bp, Artificial Sequence
  synthetic construct; oligonucleotide
gtagctcttagcgttgttcctcaagaagtcttgccagctttc

SEQ ID NO: 1755 - DNA, 42 bp, Artificial Sequence
  synthetic construct; oligonucleotide
sawgctcttagcaabgttcctcaagaagtcttgccagctttc

SEQ ID NO: 1756 - DNA, 42 bp, Artificial Sequence
  synthetic construct; oligonucleotide
ccagctcttagcaabgttcctcaagaagtcttgccagctttc

SEQ ID NO: 1757 - DNA, 42 bp, Artificial Sequence
  synthetic construct; oligonucleotide
gtagctcttagcaabgttcctcaagaagtcttgccagctttc

SEQ ID NO: 1758 - DNA, 42 bp, Artificial Sequence
  synthetic construct; oligonucleotide
scagaccttggctccatcacggtgactgagcaaagcacatct

SEQ ID NO: 1759 - DNA, 42 bp, Artificial Sequence
  synthetic construct; oligonucleotide
caygaccttggctccatcacggtgactgagcaaagcacatct

SEQ ID NO: 1760 - DNA, 42 bp, Artificial Sequence
  synthetic construct; oligonucleotide
ctccrcagwttcatactgttgctccgtcmacgctgtacctag

SEQ ID NO: 1761 - DNA, 42 bp, Artificial Sequence
  synthetic construct; oligonucleotide
ctccrcagwttcatactgttgctccgtgwacgctgtacctag

SEQ ID NO: 1762 - DNA, 42 bp, Artificial Sequence
  synthetic construct; oligonucleotide
ctccrcagwttcatactgttgctccgtcmaccstgtacctag

SEQ ID NO: 1763 - DNA, 42 bp, Artificial Sequence
  synthetic construct; oligonucleotide
ctccrcagwttcatactgttgctccgtgwaccstgtacctag

SEQ ID NO: 1764 - DNA, 42 bp, Artificial Sequence
  synthetic construct; oligonucleotide
ctcaagggagaaaccttgttggcacaggaaggccawcatgtt

SEQ ID NO: 1765 - DNA, 42 bp, Artificial Sequence
  synthetic construct; oligonucleotide
cagagtgaaaayccgcrcagccghgabtgcgtacawggcatt

SEQ ID NO: 1766 - DNA, 42 bp, Artificial Sequence
  synthetic construct; oligonucleotide
cagagtgaaaayccgcrcagcctkgabtgcgtacawggcatt

SEQ ID NO: 1767 - DNA, 42 bp, Artificial Sequence
  synthetic construct; oligonucleotide
cagagtgaaaayccgcrcagcgcrgabtgcgtacawggcatt

SEQ ID NO: 1768 - DNA, 42 bp, Artificial Sequence
  synthetic construct; oligonucleotide
cagagtgaaaayccgcrcagcktcgabtgcgtacawggcatt

SEQ ID NO: 1769 - DNA, 42 bp, Artificial Sequence
  synthetic construct; oligonucleotide
ctccttagcgacttgggactcttgatccmvcaatacgcaacc

SEQ ID NO: 1770 - DNA, 42 bp, Artificial Sequence
  synthetic construct; oligonucleotide
ctccttagcgacttgggactcttgatccttcaatacgcaacc

SEQ ID NO: 1771 - DNA, 42 bp, Artificial Sequence
  synthetic construct; oligonucleotide
ctccttagcgacttgggactcttgatcamacaatacgcaacc

SEQ ID NO: 1772 - DNA, 42 bp, Artificial Sequence
  synthetic construct; oligonucleotide
aakcagtggcggcatactatcagtagtaggtgtttccctctc

SEQ ID NO: 1773 - DNA, 42 bp, Artificial Sequence
  synthetic construct; oligonucleotide
tggctctgcaccttggtgatcttkgagttcccaagcttgtcg

SEQ ID NO: 1774 - DNA, 42 bp, Artificial Sequence
  synthetic construct; oligonucleotide
ctccaatccgcatatgatcaattcaaggccgaacaggaaggc

SEQ ID NO: 1775 - DNA, 42 bp, Artificial Sequence
  synthetic construct; oligonucleotide
cttcggcgcgccttaagacccactttcacacttcagctgctt

SEQ ID NO: 1776 - DNA, 42 bp, Artificial Sequence; identical to SEQ ID NO: 1715
  synthetic construct; oligonucleotide

SEQ ID NO: 1777 - DNA, 42 bp, Artificial Sequence
  synthetic construct; oligonucleotide
ctagacgccttggccattgagatgatggataggcaccaaacc

SEQ ID NO: 1778 - DNA, 42 bp, Artificial Sequence
  synthetic construct; oligonucleotide
cactactygcctttggaaggggaaagctggcaagacttcttg

SEQ ID NO: 1779 - DNA, 42 bp, Artificial Sequence
  synthetic construct; oligonucleotide
aggaacaacgctaagagctgcagacgtgctttgctcagtcac

SEQ ID NO: 1780 - DNA, 42 bp, Artificial Sequence
  synthetic construct; oligonucleotide
aggaacaacgctaagagctgcagaaatgctttgctcagtcac

SEQ ID NO: 1781 - DNA, 42 bp, Artificial Sequence
  synthetic construct; oligonucleotide
cgtgatggagccaaggtctgcctaggtacacggtggacggag

SEQ ID NO: 1782 - DNA, 42 bp, Artificial Sequence
  synthetic construct; oligonucleotide
caacagtatgaatctgcggagaacatgttggccttcctgacc

SEQ ID NO: 1783 - DNA, 42 bp, Artificial Sequence
  synthetic construct; oligonucleotide
caacaaggtttctcccttgagaatgccttgtacgcagtctcc

SEQ ID NO: 1784 - DNA, 42 bp, Artificial Sequence
  synthetic construct; oligonucleotide
gctgtgcgggttttcactctgggttgggtattgttcgatcaa

SEQ ID NO: 1785 - DNA, 42 bp, Artificial Sequence
  synthetic construct; oligonucleotide
gctgtgcgggttttcactctgggtgccgtattgttcgatcaa

SEQ ID NO: 1786 - DNA, 42 bp, Artificial Sequence; identical to SEQ ID NO: 1741
  synthetic construct; oligonucleotide

SEQ ID NO: 1787 - DNA, 42 bp, Artificial Sequence
  synthetic construct; oligonucleotide
gatagtatgccgccactgcttcgacaagcttgggaactcaaa

SEQ ID NO: 1788 - DNA, 42 bp, Artificial Sequence; identical to SEQ ID NO: 1743
  synthetic construct; oligonucleotide

SEQ ID NO: 1789 - DNA, 42 bp, Artificial Sequence
  synthetic construct; oligonucleotide
ttgatcatakccggattggagaagcagctgaagkcagaaagt

SEQ ID NO: 1790 - DNA, 42 bp, Artificial Sequence
  synthetic construct; oligonucleotide
ttgatcatakccggattggagaagcagctgaagagagaaagt

SEQ ID NO: 1791 - DNA, 42 bp, Artificial Sequence
  synthetic construct; oligonucleotide
ttgatcatacgcggattggagaagcagctgaagkcagaaagt

SEQ ID NO: 1792 - DNA, 42 bp, Artificial Sequence
  synthetic construct; oligonucleotide
ttgatcatacgcggattggagaagcagctgaagagagaaagt

SEQ ID NO: 1793 - DNA, 39 bp, Artificial Sequence
  synthetic construct; oligonucleotide
gggtcttaatgatagctgcagaaggtaccttggcgcgcc

SEQ ID NO: 1794 - DNA, 42 bp, Artificial Sequence
  synthetic construct; oligonucleotide
ctcaatggccaaggcgtctagcagagctcgcttgttcttgac

SEQ ID NO: 1795 - DNA, 42 bp, Artificial Sequence
  synthetic construct; oligonucleotide
cccttccaaaggcragtagtgggtttggtgcctatccatcat

SEQ ID NO: 1796 - DNA, 42 bp, Artificial Sequence
  synthetic construct; oligonucleotide
gcagctcttagcgttgttcctcaagaagtcttgccagctttc

SEQ ID NO: 1797 - DNA, 42 bp, Artificial Sequence
  synthetic construct; oligonucleotide
gcagaccttggctccatcacggtgactgagcaaagcacgtct

SEQ ID NO: 1798 - DNA, 42 bp, Artificial Sequence
  synthetic construct; oligonucleotide
gcagaccttggctccatcacggtgactgagcaaagcatttct

SEQ ID NO: 1799 - DNA, 42 bp, Artificial Sequence
  synthetic construct; oligonucleotide
ctccgcagattcatactgttgctccgtccaccgtgtacctag

SEQ ID NO: 1800 - DNA, 42 bp, Artificial Sequence
  synthetic construct; oligonucleotide
ctcaagggagaaaccttgttgggtcaggaaggccaacatgtt

SEQ ID NO: 1801 - DNA, 42 bp, Artificial Sequence
  synthetic construct; oligonucleotide
cagagtgaaaacccgcacagcggagactgcgtacaaggcatt

SEQ ID NO: 1802 - DNA, 42 bp, Artificial Sequence
  synthetic construct; oligonucleotide
ctccttagcgacttgggactcttgatcgaacaatacccaacc

SEQ ID NO: 1803 - DNA, 42 bp, Artificial Sequence
  synthetic construct; oligonucleotide
ctccttagcgacttgggactcttgatcgaacaatacggcacc

SEQ ID NO: 1804 - DNA, 42 bp, Artificial Sequence
  synthetic construct; oligonucleotide
aagcagtggcggcatactatcagtagtaggtgtttccctctc

SEQ ID NO: 1805 - DNA, 42 bp, Artificial Sequence
  synthetic construct; oligonucleotide
tggctctgcaccttggtgatctttgagttcccaagcttgtcg

SEQ ID NO: 1806 - DNA, 42 bp, Artificial Sequence
  synthetic construct; oligonucleotide
ctccaatccggmtatgatcaattcaaggccgaacaggaaggc

SEQ ID NO: 1807 - DNA, 42 bp, Artificial Sequence
  synthetic construct; oligonucleotide
ctccaatccgcgtatgatcaattcaaggccgaacaggaaggc

SEQ ID NO: 1808 - DNA, 42 bp, Artificial Sequence
  synthetic construct; oligonucleotide
ctgcagctatcattaagacccactttctgmcttcagctgctt

SEQ ID NO: 1809 - DNA, 42 bp, Artificial Sequence
  synthetic construct; oligonucleotide
ctgcagctatcattaagacccactttctctcttcagctgctt

SEQ ID NO: 1810 - DNA, 41 bp, Artificial Sequence
  synthetic construct; oligonucleotide
  misc_feature (18)..(19): n is a, c, g, or t
ccttggccattgagatgnnkgataggcaccaaacccactac

SEQ ID NO: 1811 - DNA, 41 bp, Artificial Sequence
  synthetic construct; oligonucleotide
  misc_feature (23)..(24): n is a, c, g, or t
gtagtgggtttggtgcctatcmnncatctcaatggccaagg

SEQ ID NO: 1812 - DNA, 39 bp, Artificial Sequence
  synthetic construct; oligonucleotide
  misc_feature (19)..(20): n is a, c, g, or t
gagatgatggataggcacnnkacccactacttgcctttg

SEQ ID NO: 1813 - DNA, 39 bp, Artificial Sequence
  synthetic construct; oligonucleotide
  misc_feature (20)..(21): n is a, c, g, or t
caaaggcaagtagtgggtmnngtgcctatccatcatctc

SEQ ID NO: 1814 - DNA, 40 bp, Artificial Sequence
  synthetic construct; oligonucleotide
  misc_feature (19)..(20): n is a, c, g, or t
caagacttcttgaggaacnnkgctaagagctgcagacgtg

SEQ ID NO: 1815 - DNA, 40 bp, Artificial Sequence
  synthetic construct; oligonucleotide
  misc_feature (21)..(22): n is a, c, g, or t
cacgtctgcagctcttagcmnngttcctcaagaagtcttg

SEQ ID NO: 1816 - DNA, 41 bp, Artificial Sequence
  synthetic construct; oligonucleotide
  misc_feature (20)..(21): n is a, c, g, or t
gaggaacaacgctaagagcnnkagacgtgctttgctcagtc

SEQ ID NO: 1817 - DNA, 41 bp, Artificial Sequence
  synthetic construct; oligonucleotide
  misc_feature (21)..(22): n is a, c, g, or t
gactgagcaaagcacgtctmnngctcttagcgttgttcctc

SEQ ID NO: 1818 - DNA, 39 bp, Artificial Sequence
  synthetic construct; oligonucleotide
  misc_feature (19)..(20): n is a, c, g, or t
cgtgatggagccaaggtcnnkctaggtacacggtggacg

SEQ ID NO: 1819 - DNA, 39 bp, Artificial Sequence
  synthetic construct; oligonucleotide
  misc_feature (20)..(21): n is a, c, g, or t
cgtccaccgtgtacctagmnngaccttggctccatcacg

SEQ ID NO: 1820 - DNA, 41 bp, Artificial Sequence
  synthetic construct; oligonucleotide
  misc_feature (20)..(21): n is a, c, g, or t
caaggtctgcctaggtacannktggacggagcaacagtatg

SEQ ID NO: 1821 - DNA, 41 bp, Artificial Sequence
  synthetic construct; oligonucleotide
  misc_feature (21)..(22): n is a, c, g, or t
catactgttgctccgtccamnntgtacctaggcagaccttg

SEQ ID NO: 1822 - DNA, 41 bp, Artificial Sequence
  synthetic construct; oligonucleotide
  misc_feature (19)..(20): n is a, c, g, or t
gtctgcctaggtacacggnnkacggagcaacagtatgaaac

SEQ ID NO: 1823 - DNA, 41 bp, Artificial Sequence
  synthetic construct; oligonucleotide
  misc_feature (22)..(23): n is a, c, g, or t
gtttcatactgttgctccgtmnnccgtgtacctaggcagac

SEQ ID NO: 1824 - DNA, 40 bp, Artificial Sequence
  synthetic construct; oligonucleotide
  misc_feature (19)..(20): n is a, c, g, or t
gagcaacagtatgaaactnnkgagaacatgttggccttcc

SEQ ID NO: 1825 - DNA, 40 bp, Artificial Sequence
  synthetic construct; oligonucleotide
  misc_feature (21)..(22): n is a, c, g, or t
ggaaggccaacatgttctcmnnagtttcatactgttgctc

SEQ ID NO: 1826 - DNA, 41 bp, Artificial Sequence
  synthetic construct; oligonucleotide
  misc_feature (20)..(21): n is a, c, g, or t
gtatgaaactgcggagaacnnkttggccttcctgacccaac

SEQ ID NO: 1827 - DNA, 41 bp, Artificial Sequence
  synthetic construct; oligonucleotide
  misc_feature (21)..(22): n is a, c, g, or t
gttgggtcaggaaggccaamnngttctccgcagtttcatac

SEQ ID NO: 1828 - DNA, 41 bp, Artificial Sequence
  synthetic construct; oligonucleotide
  misc_feature (19)..(20): n is a, c, g, or t
gagaatgccttgtacgcannktccgctgtgcgggttttcac

SEQ ID NO: 1829 - DNA, 41 bp, Artificial Sequence
  synthetic construct; oligonucleotide
  misc_feature (22)..(23): n is a, c, g, or t
gtgaaaacccgcacagcggamnntgcgtacaaggcattctc

SEQ ID NO: 1830 - DNA, 41 bp, Artificial Sequence
  synthetic construct; oligonucleotide
  misc_feature (20)..(21): n is a, c, g, or t
gaatgccttgtacgcagtcnnkgctgtgcgggttttcactc

SEQ ID NO: 1831 - DNA, 41 bp, Artificial Sequence
  synthetic construct; oligonucleotide
  misc_feature (21)..(22): n is a, c, g, or t
gagtgaaaacccgcacagcmnngactgcgtacaaggcattc

SEQ ID NO: 1832 - DNA, 40 bp, Artificial Sequence
  synthetic construct; oligonucleotide
  misc_feature (20)..(21): n is a, c, g, or t
gtacgcagtctccgctgtgnnkgttttcactctgggtgcc

SEQ ID NO: 1833 - DNA, 40 bp, Artificial Sequence
  synthetic construct; oligonucleotide
  misc_feature (20)..(21): n is a, c, g, or t
ggcacccagagtgaaaacmnncacagcggagactgcgtac

SEQ ID NO: 1834 - DNA, 41 bp, Artificial Sequence
  synthetic construct; oligonucleotide
  misc_feature (21)..(22): n is a, c, g, or t
acgcagtctccgctgtgcggnnkttcactctgggtgccgta

SEQ ID NO: 1835 - DNA, 41 bp, Artificial Sequence
  synthetic construct; oligonucleotide
  misc_feature (20)..(21): n is a, c, g, or t
tacggcacccagagtgaamnnccgcacagcggagactgcgt

SEQ ID NO: 1836 - DNA, 40 bp, Artificial Sequence
  synthetic construct; oligonucleotide
  misc_feature (20)..(21): n is a, c, g, or t
cactctgggtgccgtattgnnkgatcaagagtcccaagtc

SEQ ID NO: 1837 - DNA, 40 bp, Artificial Sequence
  synthetic construct; oligonucleotide
  misc_feature (20)..(21): n is a, c, g, or t
gacttgggactcttgatcmnncaatacggcacccagagtg

SEQ ID NO: 1838 - DNA, 42 bp, Artificial Sequence
  synthetic construct; oligonucleotide
  misc_feature (20)..(21): n is a, c, g, or t
cgtattgttcgatcaagagnnkcaagtcgctaaggaggagag

SEQ ID NO: 1839 - DNA, 42 bp, Artificial Sequence
  synthetic construct; oligonucleotide
  misc_feature (22)..(23): n is a, c, g, or t
ctctcctccttagcgacttgmnnctcttgatcgaacaatacg

SEQ ID NO: 1840 - DNA, 41 bp, Artificial Sequence
  synthetic construct; oligonucleotide
  misc_feature (20)..(21): n is a, c, g, or t
gccactgcttcgacaagctnnkgaactcaaagatcaccaag

SEQ ID NO: 1841 - DNA, 41 bp, Artificial Sequence
  synthetic construct; oligonucleotide
  misc_feature (21)..(22): n is a, c, g, or t
cttggtgatctttgagttcmnnagcttgtcgaagcagtggc

SEQ ID NO: 1842 - DNA, 41 bp, Artificial Sequence
  synthetic construct; oligonucleotide
  misc_feature (20)..(21): n is a, c, g, or t
tcgacaagcttgggaactcnnkgatcaccaaggtgcagagc

SEQ ID NO: 1843 - DNA, 41 bp, Artificial Sequence
  synthetic construct; oligonucleotide
  misc_feature (21)..(22): n is a, c, g, or t
gctctgcaccttggtgatcmnngagttcccaagcttgtcga

SEQ ID NO: 1844 - DNA, 42 bp, Artificial Sequence
  synthetic construct; oligonucleotide
tggcacgtcaagaacaagcgagctctgctagacgccttggcc

SEQ ID NO: 1845 - DNA, 42 bp, Artificial Sequence
  synthetic construct; oligonucleotide
attgagatgmatgataggcacrgcacccactacttgcctttg

SEQ ID NO: 1846 - DNA, 42 bp, Artificial Sequence
  synthetic construct; oligonucleotide
attgagatgmatgataggcaccagacccactacttgcctttg

SEQ ID NO: 1847 - DNA, 42 bp, Artificial Sequence
  synthetic construct; oligonucleotide
attgagatgatggataggcacrgcacccactacttgcctttg

SEQ ID NO: 1848 - DNA, 42 bp, Artificial Sequence
  synthetic construct; oligonucleotide
attgagatgatggataggcaccagacccactacttgcctttg

SEQ ID NO: 1849 - DNA, 42 bp, Artificial Sequence
  synthetic construct; oligonucleotide
gaaggggaaagctggcaagacttcttgaggaactwcgctaag

SEQ ID NO: 1850 - DNA, 42 bp, Artificial Sequence
  synthetic construct; oligonucleotide
agctcccgacgtgctttgctcagtcaccgtgatggagccaag

SEQ ID NO: 1851 - DNA, 42 bp, Artificial Sequence
  synthetic construct; oligonucleotide
agcatgcgacgtgctttgctcagtcaccgtgatggagccaag

SEQ ID NO: 1852 - DNA, 42 bp, Artificial Sequence
  synthetic construct; oligonucleotide
gtckcgcttggtacacggtggacggagcaacagtatgaaact

SEQ ID NO: 1853 - DNA, 42 bp, Artificial Sequence
  synthetic construct; oligonucleotide
gsagagaacwtgttggccttcctgacccaacaaggtttctcc

SEQ ID NO: 1854 - DNA, 42 bp, Artificial Sequence
  synthetic construct; oligonucleotide
cttgagaatgccttgtacgcaaccgrcgctgtgcrtrttttc

SEQ ID NO: 1855 - DNA, 42 bp, Artificial Sequence
  synthetic construct; oligonucleotide
cttgagaatgccttgtacgcaacctcagctgtgcrtrttttc

SEQ ID NO: 1856 - DNA, 42 bp, Artificial Sequence
  synthetic construct; oligonucleotide
cttgagaatgccttgtacgcastggrcgctgtgcrtrttttc

SEQ ID NO: 1857 - DNA, 42 bp, Artificial Sequence
  synthetic construct; oligonucleotide
cttgagaatgccttgtacgcastgtcagctgtgcrtrttttc

SEQ ID NO: 1858 - DNA, 42 bp, Artificial Sequence
  synthetic construct; oligonucleotide
actctgggtgccgtattggtggatcaagagrgccaagtcgct

SEQ ID NO: 1859 - DNA, 42 bp, Artificial Sequence
  synthetic construct; oligonucleotide
actctgggtgccgtattggtggatcaagagcagcaagtcgct

SEQ ID NO: 1860 - DNA, 42 bp, Artificial Sequence
  synthetic construct; oligonucleotide
actctgggtgccgtattgcaagatcaagagrgccaagtcgct

SEQ ID NO: 1861 - DNA, 42 bp, Artificial Sequence
  synthetic construct; oligonucleotide
actctgggtgccgtattgcaagatcaagagcagcaagtcgct

SEQ ID NO: 1862 - DNA, 42 bp, Artificial Sequence; identical to SEQ ID NO: 1017
  synthetic construct; oligonucleotide

SEQ ID NO: 1863 - DNA, 42 bp, Artificial Sequence
  synthetic construct; oligonucleotide
ctgcttcgacaagcctgggaactcaaagatcaccaaggtgca

SEQ ID NO: 1864 - DNA, 42 bp, Artificial Sequence
  synthetic construct; oligonucleotide
gagccagccttcctgttcggccttgaattgatcatagccgga

SEQ ID NO: 1865 - DNA, 42 bp, Artificial Sequence
  synthetic construct; oligonucleotide
ttggagaagcagctgaagagagaaagtgggtctcaccatcac

SEQ ID NO: 1866 - DNA, 42 bp, Artificial Sequence
  synthetic construct; oligonucleotide
gtgcctatcatkcatctcaatggccaaggcgtctagcagagc

SEQ ID NO: 1867 - DNA, 42 bp, Artificial Sequence
  synthetic construct; oligonucleotide
gtgcctatccatcatctcaatggccaaggcgtctagcagagc

SEQ ID NO: 1868 - DNA, 42 bp, Artificial Sequence
  synthetic construct; oligonucleotide
gtcttgccagctttccccttccaaaggcaagtagtgggtgct

SEQ ID NO: 1869 - DNA, 42 bp, Artificial Sequence
  synthetic construct; oligonucleotide
gtcttgccagctttccccttccaaaggcaagtagtgggtgcc

SEQ ID NO: 1870 - DNA, 42 bp, Artificial Sequence
  synthetic construct; oligonucleotide
gtcttgccagctttccccttccaaaggcaagtagtgggtctg

SEQ ID NO: 1871 - DNA, 42 bp, Artificial Sequence
  synthetic construct; oligonucleotide
gagcaaagcacgtcgggagctcttagcgwagttcctcaagaa

SEQ ID NO: 1872 - DNA, 42 bp, Artificial Sequence
  synthetic construct; oligonucleotide
gagcaaagcacgtcgcatgctcttagcgwagttcctcaagaa

SEQ ID NO: 1873 - DNA, 42 bp, Artificial Sequence
  synthetic construct; oligonucleotide
ccaccgtgtaccaagcgmgaccttggctccatcacggtgact

SEQ ID NO: 1874 - DNA, 42 bp, Artificial Sequence
  synthetic construct; oligonucleotide
gaaggccaacawgttctctscagtttcatactgttgctccgt

SEQ ID NO: 1875 - DNA, 42 bp, Artificial Sequence
  synthetic construct; oligonucleotide
tgcgtacaaggcattctcaagggagaaaccttgttgggtcag

SEQ ID NO: 1876 - DNA, 42 bp, Artificial Sequence
  synthetic construct; oligonucleotide
caccaatacggcacccagagtgaaaayaygcacagcgycggt

SEQ ID NO: 1877 - DNA, 42 bp, Artificial Sequence
  synthetic construct; oligonucleotide
ttgcaatacggcacccagagtgaaaayaygcacagcgycggt

SEQ ID NO: 1878 - DNA, 42 bp, Artificial Sequence
  synthetic construct; oligonucleotide
caccaatacggcacccagagtgaaaayaygcacagctgaggt

SEQ ID NO: 1879 - DNA, 42 bp, Artificial Sequence
  synthetic construct; oligonucleotide
ttgcaatacggcacccagagtgaaaayaygcacagctgaggt

SEQ ID NO: 1880 - DNA, 42 bp, Artificial Sequence
  synthetic construct; oligonucleotide
caccaatacggcacccagagtgaaaayaygcacagcgyccac

SEQ ID NO: 1881 - DNA, 42 bp, Artificial Sequence
  synthetic construct; oligonucleotide
caccaatacggcacccagagtgaaaayaygcacagcgyccag

SEQ ID NO: 1882 - DNA, 42 bp, Artificial Sequence
  synthetic construct; oligonucleotide
ttgcaatacggcacccagagtgaaaayaygcacagcgyccac

SEQ ID NO: 1883 - DNA, 42 bp, Artificial Sequence
  synthetic construct; oligonucleotide
ttgcaatacggcacccagagtgaaaayaygcacagcgyccag

SEQ ID NO: 1884 - DNA, 42 bp, Artificial Sequence
  synthetic construct; oligonucleotide
caccaatacggcacccagagtgaaaayaygcacagctgacac

SEQ ID NO: 1885 - DNA, 42 bp, Artificial Sequence
  synthetic construct; oligonucleotide
caccaatacggcacccagagtgaaaayaygcacagctgacag

SEQ ID NO: 1886 - DNA, 42 bp, Artificial Sequence
  synthetic construct; oligonucleotide
ttgcaatacggcacccagagtgaaaayaygcacagctgacac

SEQ ID NO: 1887 - DNA, 42 bp, Artificial Sequence
  synthetic construct; oligonucleotide
ttgcaatacggcacccagagtgaaaayaygcacagctgacag

SEQ ID NO: 1888 - DNA, 42 bp, Artificial Sequence
  synthetic construct; oligonucleotide
aggtgtttccctctcctccttagcgacttggcyctcttgatc

SEQ ID NO: 1889 - DNA, 42 bp, Artificial Sequence
  synthetic construct; oligonucleotide
aggtgtttccctctcctccttagcgacttgctgctcttgatc

SEQ ID NO: 1890 - DNA, 42 bp, Artificial Sequence
  synthetic construct; oligonucleotide
ttcccaggcttgtcgaagcagtggcggcatactatcagtagt

SEQ ID NO: 1891 - DNA, 42 bp, Artificial Sequence
  synthetic construct; oligonucleotide
gccgaacaggaaggctggctctgcaccttggtgatctttgag

SEQ ID NO: 1892 - DNA, 42 bp, Artificial Sequence
  synthetic construct; oligonucleotide
tctcttcagctgcttctccaatccggctatgatcaattcaag

SEQ ID NO: 1893 - DNA, 45 bp, Artificial Sequence
  synthetic construct; oligonucleotide
cacaggcgcgccttagtgatggtggtgatggtgagacccactttc

SEQ ID NO: 1894 - DNA, 42 bp, Artificial Sequence; identical to SEQ ID NO: 1844
  synthetic construct; oligonucleotide

SEQ ID NO: 1895 - DNA, 42 bp, Artificial Sequence
  synthetic construct; oligonucleotide
attgagatgcatgataggcacggaacccactacttgcctttg

SEQ ID NO: 1896 - DNA, 42 bp, Artificial Sequence
  synthetic construct; oligonucleotide
attgagatgcatgataggcaccaaacccactacttgcctttg

SEQ ID NO: 1897 - DNA, 42 bp, Artificial Sequence
  synthetic construct; oligonucleotide
attgagatgatggataggcacggaacccactacttgcctttg

SEQ ID NO: 1898 - DNA, 42 bp, Artificial Sequence
  synthetic construct; oligonucleotide
attgagatgatggataggcaccaaacccactacttgcctttg

SEQ ID NO: 1899 - DNA, 42 bp, Artificial Sequence
  synthetic construct; oligonucleotide
gaaggggaaagctggcaagactwtttgaggaactwtgctaag

SEQ ID NO: 1900 - DNA, 42 bp, Artificial Sequence
  synthetic construct; oligonucleotide
agcatgcgackagctttgctcagtcaccgtgatggagccaag

SEQ ID NO: 1901 - DNA, 42 bp, Artificial Sequence
  synthetic construct; oligonucleotide
agcatgcgatgcgctttgctcagtcaccgtgatggagccaag

SEQ ID NO: 1902 - DNA, 42 bp, Artificial Sequence
  synthetic construct; oligonucleotide
gtckcccttggtacacggtggacggagcaacagtatgaaact

SEQ ID NO: 1903 - DNA, 42 bp, Artificial Sequence
  synthetic construct; oligonucleotide
gcggagaacatgttggccttcctgacccaacaaggtttctcc

SEQ ID NO: 1904 - DNA, 42 bp, Artificial Sequence
  synthetic construct; oligonucleotide
cttgagaatgccttgtacgcaacagatgctgtgcgggttttc

SEQ ID NO: 1905 - DNA, 42 bp, Artificial Sequence
  synthetic construct; oligonucleotide
cttgagaatgccttgtacgcaacaagcgctgtgcgggttttc

SEQ ID NO: 1906 - DNA, 42 bp, Artificial Sequence
  synthetic construct; oligonucleotide
actctgggtgccgtattgcwggatcaagagggacaagtcgct

SEQ ID NO: 1907 - DNA, 42 bp, Artificial Sequence
  synthetic construct; oligonucleotide
actctgggtgccgtattgcwggatcaagagcaacaagtcgct

SEQ ID NO: 1908 - DNA, 42 bp, Artificial Sequence
  synthetic construct; oligonucleotide
aakgaggagagggaaacacctactmctgatagwatgccgcca

SEQ ID NO: 1909 - DNA, 42 bp, Artificial Sequence
  synthetic construct; oligonucleotide
ctgcttcgacaagcctgggaactcaaagwkcaccaaggtgca

SEQ ID NO: 1910 - DNA, 42 bp, Artificial Sequence; identical to SEQ ID NO: 1864
  synthetic construct; oligonucleotide

SEQ ID NO: 1911 - DNA, 42 bp, Artificial Sequence; identical to SEQ ID NO: 1865
  synthetic construct; oligonucleotide

SEQ ID NO: 1912 - DNA, 42 bp, Artificial Sequence
  synthetic construct; oligonucleotide
gtgcctatcatgcatctcaatggccaaggcgtctagcagagc

SEQ ID NO: 1913 - DNA, 42 bp, Artificial Sequence; identical to SEQ ID NO: 1867
  synthetic construct; oligonucleotide

SEQ ID NO: 1914 - DNA, 42 bp, Artificial Sequence
  synthetic construct; oligonucleotide
gtcttgccagctttccccttccaaaggcaagtagtgggttcc

SEQ ID NO: 1915 - DNA, 42 bp, Artificial Sequence
  synthetic construct; oligonucleotide
gtcttgccagctttccccttccaaaggcaagtagtgggtttg

SEQ ID NO: 1916 - DNA, 42 bp, Artificial Sequence
  synthetic construct; oligonucleotide
gagcaaagctmgtcgcatgctcttagcawagttcctcaaawa

SEQ ID NO: 1917 - DNA, 42 bp, Artificial Sequence
  synthetic construct; oligonucleotide
gagcaaagcgcatcgcatgctcttagcawagttcctcaaawa

SEQ ID NO: 1918 - DNA, 42 bp, Artificial Sequence
  synthetic construct; oligonucleotide
ccaccgtgtaccaagggmgaccttggctccatcacggtgact

SEQ ID NO: 1919 - DNA, 42 bp, Artificial Sequence
  synthetic construct; oligonucleotide
gaaggccaacatgttctccgcagtttcatactgttgctccgt

SEQ ID NO: 1920 - DNA, 42 bp, Artificial Sequence; identical to SEQ ID NO: 1875
  synthetic construct; oligonucleotide

SEQ ID NO: 1921 - DNA, 42 bp, Artificial Sequence
  synthetic construct; oligonucleotide
cwgcaatacggcacccagagtgaaaacccgcacagcatctgt

SEQ ID NO: 1922 - DNA, 42 bp, Artificial Sequence
  synthetic construct; oligonucleotide
cwgcaatacggcacccagagtgaaaacccgcacagcgcttgt

SEQ ID NO: 1923 - DNA, 42 bp, Artificial Sequence
  synthetic construct; oligonucleotide
aggtgtttccctctcctcmttagcgacttgtccctcttgatc

SEQ ID NO: 1924 - DNA, 42 bp, Artificial Sequence
  synthetic construct; oligonucleotide
aggtgtttccctctcctcmttagcgacttgttgctcttgatc

SEQ ID NO: 1925 - DNA, 42 bp, Artificial Sequence
  synthetic construct; oligonucleotide
ttcccaggcttgtcgaagcagtggcggcatwctatcagkagt

SEQ ID NO: 1926 - DNA, 42 bp, Artificial Sequence
  synthetic construct; oligonucleotide
gccgaacaggaaggctggctctgcaccttggtgmwctttgag

SEQ ID NO: 1927 - DNA, 42 bp, Artificial Sequence; identical to SEQ ID NO: 1892
  synthetic construct; oligonucleotide

SEQ ID NO: 1928 - DNA, 45 bp, Artificial Sequence; identical to SEQ ID NO: 1893
  synthetic construct; oligonucleotide

SEQ ID NO: 1929 - DNA, 40 bp, Artificial Sequence
  synthetic construct; oligonucleotide
  misc_feature (19)..(20): n is a, c, g, or t
gctctgctagacgccttgnnkattgagatgcatgataggc

SEQ ID NO: 1930 - DNA, 40 bp, Artificial Sequence
  synthetic construct; oligonucleotide
  misc_feature (21)..(22): n is a, c, g, or t
gcctatcatgcatctcaatmnncaaggcgtctagcagagc

SEQ ID NO: 1931 - DNA, 37 bp, Artificial Sequence
  synthetic construct; oligonucleotide
  misc_feature (19)..(20): n is a, c, g, or t
gccaaggtctcccttggtnnkcggtggacggagcaac

SEQ ID NO: 1932 - DNA, 37 bp, Artificial Sequence
  synthetic construct; oligonucleotide
  misc_feature (18)..(19): n is a, c, g, or t
gttgctccgtccaccgmnnaccaagggagaccttggc

SEQ ID NO: 1933 - DNA, 35 bp, Artificial Sequence
  synthetic construct; oligonucleotide
  misc_feature (18)..(19): n is a, c, g, or t
ggtggacggagcaacagnnkgaaactgcggagaac

SEQ ID NO: 1934 - DNA, 35 bp, Artificial Sequence
  synthetic construct; oligonucleotide
  misc_feature (17)..(18): n is a, c, g, or t
gttctccgcagtttcmnnctgttgctccgtccacc

SEQ ID NO: 1935 - DNA, 37 bp, Artificial Sequence
  synthetic construct; oligonucleotide
  misc_feature (19)..(20): n is a, c, g, or t
gaaactgcggagaacatgnnkgccttcctgacccaac

SEQ ID NO: 1936 - DNA, 37 bp, Artificial Sequence
  synthetic construct; oligonucleotide
  misc_feature (18)..(19): n is a, c, g, or t
gttgggtcaggaaggcmnncatgttctccgcagtttc

SEQ ID NO: 1937 - DNA, 38 bp, Artificial Sequence
  synthetic construct; oligonucleotide
  misc_feature (22)..(23): n is a, c, g, or t
ggtttctcccttgagaatgccnnktacgcaacagatgc

SEQ ID NO: 1938 - DNA, 38 bp, Artificial Sequence
  synthetic construct; oligonucleotide
  misc_feature (16)..(17): n is a, c, g, or t
gcatctgttgcgtamnnggcattctcaagggagaaacc

SEQ ID NO: 1939 - DNA, 37 bp, Artificial Sequence
  synthetic construct; oligonucleotide
  misc_feature (17)..(18): n is a, c, g, or t
gaatgccttgtacgcannkgatgctgtgcgggttttc

SEQ ID NO: 1940 - DNA, 37 bp, Artificial Sequence
  synthetic construct; oligonucleotide
  misc_feature (20)..(21): n is a, c, g, or t
gaaaacccgcacagcatcmnntgcgtacaaggcattc

SEQ ID NO: 1941 - DNA, 35 bp, Artificial Sequence
  synthetic construct; oligonucleotide
  misc_feature (16)..(17): n is a, c, g, or t
gcaacagatgctgtgnnkgttttcactctgggtgc

SEQ ID NO: 1942 - DNA, 35 bp, Artificial Sequence
  synthetic construct; oligonucleotide
  misc_feature (19)..(20): n is a, c, g, or t
gcacccagagtgaaaacmnncacagcatctgttgc

SEQ ID NO: 1943 - DNA, 34 bp, Artificial Sequence
  synthetic construct; oligonucleotide
  misc_feature (16)..(17): n is a, c, g, or t
gaggagagggaaacannkactcctgatagtatgc

SEQ ID NO: 1944 - DNA, 34 bp, Artificial Sequence
  synthetic construct; oligonucleotide
  misc_feature (18)..(19): n is a, c, g, or t
gcatactatcaggagtmnntgtttccctctcctc

SEQ ID NO: 1945 - DNA, 37 bp, Artificial Sequence
  synthetic construct; oligonucleotide
  misc_feature (22)..(23): n is a, c, g, or t
gaaacacctactcctgatagtnnkccgccactgcttc

SEQ ID NO: 1946 - DNA, 37 bp, Artificial Sequence
  synthetic construct; oligonucleotide
  misc_feature (15)..(16): n is a, c, g, or t
gaagcagtggcggmnnactatcaggagtaggtgtttc

SEQ ID NO: 1947 - DNA, 35 bp, Artificial Sequence
  synthetic construct; oligonucleotide
  misc_feature (17)..(18): n is a, c, g, or t
gccactgcttcgacaannktgggaactcaaagttc

SEQ ID NO: 1948 - DNA, 35 bp, Artificial Sequence
  synthetic construct; oligonucleotide
  misc_feature (18)..(19): n is a, c, g, or t
gaactttgagttcccamnnttgtcgaagcagtggc

SEQ ID NO: 1949 - DNA, 621 bp, Artificial Sequence
  synthetic construct; nucleotides encoding sulfonylurea responsive repressor
atggccagactcgacaagagcaaggtgatcaacagcgcactggagctgctgaacgaggtcggaatcgaaggcctcacaacccgtaagctcgcccagaagctcggggttgagcagcctacattgtactggcacgtcaagaacaagcgagctctgctagacgccttggccattgagatgatggataggcaccaaacccactactcgcctttggaaggggaaagctggcaagacttcttgaggaacaacgctaagagctgcagaaatgctttgctcagtcaccgtgatggagccaaggtctgcctaggtacacggtggacggagcaacagtatgaatctgcggagaacatgttggccttcctgacccaacaaggtttctcccttgagaatgccttgtacgcactcgacgctgtgcgggttttcactctgggtgccgtattgttcgatcaagagtcccaagtcgctaaggaggagagggaaacacctactactgatagtatgccgccactgcttcgacaagcttgggaactcaaagatcaccaaggtgcagagccagccttcctgttcggccttgaattgatcatagccggattggagaagcagctgaagagagaaagtgggtct

SEQ ID NO: 1950 - DNA, 621 bp, Artificial Sequence
  synthetic construct; nucleotides encoding sulfonylurea responsive repressor
atggccagactcgacaagagcaaggtgatcaacagcgcactggagctgctgaacgaggtcggaatcgaaggcctcacaacccgtaagctcgcccagaagctcggggttgagcagcctacattgtactggcacgtcaagaacaagcgagctctgctagacgccttggccattgagatgatggataggcaccaaacccactacttgcctttggaaggggaaagctggcaagacttcttgaggaacaacgctaagagctgcagaaatgctttgctcagtcaccgtgatggagccaaggtctgcctaggtacacggtggacggagcaacagtatgaaactgcggagaacatgttggccttcctgacccaacaaggtttctcccttgagaatgccttgtacgcactcgaagctgcgcgggttttcactctgggtgccgtattgttcgatcaagagtcccaagtcgctaaggaggagagggaaacacctactactgatagtatgccgccactgcttcgacaagcttgggaactcaaagatcaccaaggtgcagagccagccttcctgttcggccttgaattgatcatatccggattggagaagcagctgaagagagaaagtgggtct

SEQ ID NO: 1951 - DNA, 621 bp, Artificial Sequence
  synthetic construct; nucleotides encoding sulfonylurea responsive repressor
atggccagactcgacaagagcaaggtgatcaacagcgcactggagctgctgaacgaggtcggaatcgaaggcctcacaacccgtaagctcgcccagaagctcggggttgagcagcctacattgtactggcacgtcaagaacaagcgagctctgctagacgccttggccattgagatgatggataggcaccaaacccactactcgcctttggaaggggaaagctggcaagacttcttgaggaacaacgctaagagctgcagacgtgctttgctcagtcaccgtgatggagccaaggtctgcctaggtacacggtggacggagcaacagtatgaatctgcggagaacatgttggccttcctgacccaacaaggtttctcccttgagaatgccttgtacgcagtcgacgctgtgcgggttttcactctgggtgccgtattgttcgatcaagagtcccaagtcgctaaggaggagagggaaacacctactactgatagtatgccgccactgcttcgacaagcttgggaactcaaagatcaccaaggtgcagagccagccttcctgttcggccttgaattgatcatagccggattggagaagcagctgaaggcagaaagtgggtct

SEQ ID NO: 1952 - DNA, 621 bp, Artificial Sequence
  synthetic construct; nucleotides encoding sulfonylurea responsive repressor
atggccagactcgacaagagcaaggtgatcaacagcgcactggagctgctgaacgaggtcggaatcgaaggcctcacaacccgtaagctcgcccagaagctcggggttgagcagcctacattgtactggcacgtcaagaacaagcgagctctgctagacgccttggccattgagatgatggataggcaccaaacccactactcgcctttggaaggggaaagctggcaagacttcttgaggaacaacgctaagagctgcagacgtgctgtgctcagtcaccgtgatggagccaaggtctgcctaggtacacggtggacggagcaacagtatgaatctgcggagaacatgttggccttcctgacccaacaaggtttctcccttgagaatgccttgtacgcagtctccgctgtgcgggttttcactctgggtgccgtattgttcgatcaagagtcccaagtcgctaaggaggagagggaaacacctactactgatagtatgccgccactgcttcgacaagcttgggaactcaaagatcaccaaggtgcagagccagccttcctgttcggccttgaattgatcatagccggattggagaagcagctgaagagagaaagtgggtct

SEQ ID NO: 1953 - DNA, 621 bp, Artificial Sequence
  synthetic construct; nucleotides encoding sulfonylurea responsive repressor
atggccagactcgacaagagcaaggtgatcaacagcgcactggagctgctgaacgaggtcggaatcgaaggcctcacaacccgtaagctcgcccagaagctcggggttgagcagcctacattgtactggcacgtcaagaacaagcgagctctgctagacgccttggccattgagatgatggataggcaccaaacccactactcgcctttggaaggggaaagctggcaagacttcttgaggaacaacgctaagagctggagatgtgctttgctcagtcaccgtgatggagccaaggtctgcctaggtacacggtggacggagcaacagtatgaatctgcggagaacatgttggccttcctgacccaacaaggtttctcccttgagaatgccttgtacgcactcgaagctgtgcgggttttcactctgggttgggtattgttcgatcaagagtcccaagtcgctaaggaggagagggaaacacctactactgatagtatgccgccactgcttcgacaagcttgggaactcaaagatcaccaaggtgcagagccagccttcctgttcggccttgaattgatcatagccggattggagaagcagctgaaggcagaaagtgggtct

SEQ ID NO: 1954 - DNA, 621 bp, Artificial Sequence
  synthetic construct; nucleotides encoding sulfonylurea responsive repressor
atggccagactcgacaagagcaaggtgatcaacagcgcactggagctgctgaacgaggtcggaatcgaaggcctcacaacccgtaagctcgcccagaagctcggggttgagcagcctacattgtactggcacgtcaagaacaagcgagctctgctagacgccttggccattgagatgatggataggcaccaaacccactacttgcctttggaaggggaaagctggcaagacttcttgaggaacaacgctaagagctgcagacgtgctttgctcagtcaccgtgatggagccaaggtctgcctaggtacacggtggacggagcaacagtatgaatctgcggagaacatgttggccttcctgacccaacaaggtttctcccttgagaatgccttgtacgcagtctccgctgtgcgggttttcactctgggttgcgtattgtgggatcaagagtcccaagtcgctaaggaggagagggaaacacctactactgatagtatgccgccactgcttcgacaagcttgggaactcaaagatcaccaaggtgcagagccagccttcctgttcggccttgaattgatcatacgcggattggagaagcagctgaaggcagaaagtgggtct

SEQ ID NO: 1955 - DNA, 621 bp, Artificial Sequence
  synthetic construct; nucleotides encoding sulfonylurea responsive repressor
  misc_feature (431)..(431): n is a, c, g, or t
  misc_feature (607)..(607): n is a, c, g, or t
atggccagactcgacaagagcaaggtgatcaacagcgcactggagctgctgaacgaggtcggaatcgaaggcctcacaacccgtaagctcgcccagaagctcggggttgagcagcctacattgtactggcacgtcaagaacaagcgagctcttctagacgccttggccattgagatgatggataggcaccaaacccactacttgcctttggaaggggaaagctggcaagacttcttgaggaaccttgctaagagcatgagatgtgctttgctcagtcaccgtgatggagccaaggtctgcctaggtacacggtggacggagcaacagtatgaatctgcggagaacatgttggccttcctgacccaacaaggtttctcccttgagaatgccttgtacgcagtctccgctgtgcgggttttcactctgggtgncgtattgttcgatcaagagtcccaagtcgctaaggaggagagggaaacacctactactgatagtatgccgccactgcttcgacaagcttgggaactcaaagatcaccaaggtgcagagccagccttcctgttcggccttgaattgatcatatccggattggagaagcagctgaagncagaaagtgggtct

SEQ ID NO: 1956 - DNA, 621 bp, Artificial Sequence
  synthetic construct; nucleotides encoding sulfonylurea responsive repressor
atggccagactcgacaagagcaaggtgatcaacagcgcactggagctgctgaacgaggtcggaatcgaaggcctcacaacccgtaagctcgcccagaagctcggggttgagcagcctacattgtactggcacgtcaagaacaagcgagctctgctagacgccttggccattgagatgatggataggcaccaaacccactacttgcctttggaaggggaaagctggcaagacttcttgaggaacaacgctaagagctgcagacgtgctttgctcagtcaccgtgatggagccaaggtctgcctaggtacacggtggacggagcaacagtatgaatctgcggagaacatgttggccttcctgtgccaacaaggtttctcccttgagaatgccttgtacgcagtctccgctgtgcgggttttcactctgggtgccgtattgttcgatcaagagtcccaagtcgctaaggaggagagggaaacacctactactgatagtatgccgccactgcttcgacaagcttgggaactcaaagatcaccaaggtgcagagccagccttcctgttcggccttgaattgatcatacgcggattggagaagcagctgaaggcagaaagtgggtct

SEQ ID NO: 1957 - DNA, 621 bp, Artificial Sequence
  synthetic construct; nucleotides encoding sulfonylurea responsive repressor
atggccagactcgacaagagcaaggtgatcaacagcgcactggagctgctgaacgaggtcggaatcgaaggcctcacaacccgtaagctcgcccagaagctcggggttgagcagcctacattgtactggcacgtcaagaacaagcgagctctgctagacgccttggccattgagatgatggataggcaccaaacccactactcgcctttggaaggggaaagctggcaagacttcttgaggaacaacgctaagagctgcagacgtgctttgctcagtcaccgtgatggagccaaggtctgcctaggtacacggtggacggagcaacagtatgaatctgcggagaacatgttggccttcctgacccaacaaggtttctcccttgagaatgccttgtacgcactcacggctgcgcgggttttcactctgggttgggtattgttcgatcaagagtcccaagtcgctaaggaggagagggaaacacctactactgatagtatgccgccactgcttcgacaagcttgggaactcaaagatcaccaaggtgcagagccagccttcctgttcggccttgaattgatcatatccggattggagaagcagctgaagtcagaaagtgggtct

SEQ ID NO: 1958 - DNA, 621 bp, Artificial Sequence
  synthetic construct; nucleotides encoding sulfonylurea responsive repressor
atggccagactcgacaagagcaaggtgatcaacagcgcactggagctgctgaacgaggtcggaatcgaaggcctcacaacccgtaagctcgcccagaagctcggggttgagcagcctacattgtactggcacgtcaagaacaagcgagctctgctagacgccttggccattgagatgatggataggcaccaaacccactactcgcctttggaaggggaaagctggcaagacttcttgaggaacaacgctaagagctgcagaaatgctttgctcagtcaccgtgatggagccaaggtctgcctaggtacacggtggacggagcaacagtatgaatctgcggagaacatgttggccttcctgacccaacaaggtttctcccttgagaatgccttgtacgcagtctccgctgtgcgggttttcactctgggtgccgtattgtacgatcaagagtcccaagtcgctaaggaggagagggaaacacctactactgatagtatgccgccactgcttcgacaagcttgggaactcaaagatcaccaaggtgcagagccagccttcctgttcggccttgaattgatcatacgcggattggagaagcagctgaaggcagaaagtgggtct

SEQ ID NO: 1959 - DNA, 621 bp, Artificial Sequence
  synthetic construct; nucleotides encoding sulfonylurea responsive repressor
atggccagactcgacaagagcaaggtgatcaacagcgcactggagctgctgaacgaggtcggaatcgaaggcctcacaacccgtaagctcgcccagaagctcggggttgagcagcctacattgtactggcacgtcaagaacaagcgagctctgctagacgccttggccattgagatgatggataggcaccaaacccactacttgcctttggaaggggaaagctggcaagacttcttgaggaacaacgctaagagctgcagaaatgctttgctcagtcaccgtgatggagccaaggtctgcctaggtacacggtggacggagcaacagtatgaatctgcggagaacatgttggccttcctgacccaacaaggtttctcccttgagaatgccttgtacgcagtctccgctgtgcgggttttcactctgggtgccgtattgtacgatcaagagtcccaagtcgctaaggaggagagggaaacacctactactgatagtatgccgccactgcttcgacaagcttgggaactcaaagatcaccaaggtgcagagccagccttcctgttcggccttgaattgatcatacgcggattggagaagcagctgaaggcagaaagtgggtct

SEQ ID NO: 1960 - DNA, 621 bp, Artificial Sequence
  synthetic construct; nucleotides encoding sulfonylurea responsive repressor
atggccagactcgacaagagcaaggtgatcaacagcgcactggagctgctgaacgaggtcggaatcgaaggcctcacaacccgtaagctcgcccagaagctcggggttgagcagcctacattgtactggcacgtcaagaacaagcgagctctgctagacgccttggccattgagatgatggataggcaccaaacccactacttgcctttggaaggggaaagctggcaagacttcttgaggaacaacgctaagagctgcagacgtgctttgctcagtcaccgtgatggagccaaggtctgcctaggtacacggtggacggagcaacagtatgaaactgcggagaacatgttggccttcctgacccaacaaggtttctcccttgagaatgccttgtacgcagtctccgctgtgcgggttttcactctgggtgccgtattgttcgatcaagagtcccaagtcgctaaggaggagagggaaacacctactactgatagtatgccgccactgcttcgacaagcttgggaactcaaagatcaccaaggtgcagagccagccttcctgttcggccttgaattgatcatacgcggattggagaagcagctgaagagagaaagtgggtct

SEQ ID NO: 1961 - DNA, 621 bp, Artificial Sequence
  synthetic construct; nucleotides encoding sulfonylurea responsive repressor
atggccagactcgacaagagcaaggtgatcaacagcgcactggagctgctgaacgaggtcggaatcgaaggcctcacaacccgtaagctcgcccagaagctcggggttgagcagcctacattgtactggcacgtcaagaacaagcgagctctgctagacgccttggccattgagatgatggataggcaccaaacccactactcgcctttggaaggggaaagctggcaagacttcttgaggaacaacgctaagagctgcagaaatgctttgctcagtcaccgtgatggagccaaggtctgcctaggtacacggtggacggagcaacagtatgaatctgcggagaacatgttggccttcctgacccaacaaggtttctcccttgagaatgccttgtacgcactccaggctgtgcgggttttcactctgggtgccgtattgttcgatcaagagtcccaagtcgctaaggaggagagggaaacacctactactgatagtatgccgccactgcttcgacaagcttgggaactcaaagatcaccaaggtgcagagccagccttcctgttcggccttgaattgatcatagccggattggagaagcagctgaagagagaaagtgggtct

SEQ ID NO: 1962 - DNA, 621 bp, Artificial Sequence
  synthetic construct; nucleotides encoding sulfonylurea responsive repressor
atggccagactcgacaagagcaaggtgatcaacagcgcactggagctgctgaacgaggtcggaatcgaaggcctcacaacccgtaagctcgcccagaagctcggggttgagcagcctacattgtactggcacgtcaagaacaagcgagctctgctagacgccttggccattgagatgatggataggcaccaaacccactacttgcctttggaaggggaaagctggcaagacttcttgaggaacaacgctaagagctgcagacgtgctttgctcagtcaccgtgatggagccaaggtctgcctaggtacacggtggacggagcaacagtatgaaactgcggagaacatgttggccttcctgacccaacaaggtttctcccttgagaatgccttgtacgcagtctccgctgtgcgggttttcactctgggtgccgtattgttcgatcaagagtcccaagtcgctaaggaggagagggaaacacctactactgatagtatgccgccactgcttcgacaagcttgggaactcaaagatcaccaaggtgcagagccagccttcctgttcggccttgaattgatcatagccggattggagaagcagctgaaggcagaaagtgggtct

SEQ ID NO: 1963 - DNA, 621 bp, Artificial Sequence
  synthetic construct; nucleotides encoding sulfonylurea responsive repressor
atggccagactcgacaagagcaaggtgatcaacagcgcactggagctgctgaacgaggtcggaatcgaaggcctcacaacccgtaagctcgcccagaagctcggggttgagcagcctacattgtactggcacgtcaagaacaagcgagctctgctagacgccttggccattgagatgatggataggcaccaaacccactacttgcctttggaaggggaaagctggcaagacttcttgaggaacaacgctaagagctgcagacgtgctttgctcagtcaccgtgatggagccaaggtctgcctaggtacacggtggacggagcaacagtatgaatctgcggagaacatgttggccttcctgtgccaacaaggtttctcccttgagaatgccttgtacgcagtctccgctgtgcgggttttcactctgggtgccgtattgttcgatcaagagtcccaagtcgctaaggaggagagggaaacacctactactgatagtatgccgccactgcttcgacaagcttgggaactcaaagatcaccaaggtgcagagccagccttcctgttcggccttgaattgatcatagccggattggagaagcagctgaagagagaaagtgggtct

SEQ ID NO: 1964 - DNA, 621 bp, Artificial Sequence
  synthetic construct; nucleotides encoding sulfonylurea responsive repressor
atggccagactcgacaagagcaaggtgatcaacagcgcactggagctgctgaacgaggtcggaatcgaaggcctcacaacccgtaagctcgcccagaagctcggggttgagcagcctacattgtactggcacgtcaagaacaagcgagctctgctagacgccttggccattgagatgatggataggcaccaaacccactactcgcctttggaaggggaaagctggcaagacttcttgaggaacaacgctaagagctgcagaaatgctttgctcagtcaccgtgatggagccaaggtctgcctaggtacacggtggacggagcaacagtatgaatctgcggagaacatgttggccttcctgacccaacaaggtttctcccttgagaatgccttgtacgcactccaggctgtgcgggttttcactctgggttgggtattgttcgatcaagagtcccaagtcgctaaggaggagagggaaacacctactactgatagtatgccgccactgcttcgacaagcttgggaactcaaagatcaccaaggtgcagagccagccttcctgttcggccttgaattgatcatacgcggattggagaagcagctgaagtcagaaagtgggtct

SEQ ID NO: 1965 - DNA, 621 bp, Artificial Sequence
  synthetic construct; nucleotides encoding sulfonylurea responsive repressor
atggccagactcgacaagagcaaggtgatcaacagcgcactggagctgctgaacgaggtcggaatcgaaggcctcacaacccgtaagctcgcccagaagctcggggttgagcagcctacattgtactggcacgtcaagaacaagcgagctctgctagacgccttggccattgagatgatggataggcaccaaacccactactcgcctttggaaggggaaagctggcaagacttcttgaggaacaacgctaagagctgcagacgtgctttgctcagtcaccgtgatggagccaaggtctgcctaggtacacggtggacggagcaacagtatgaatctgcggagaacatgttggccttcctgacccaacaaggtttctcccttgagaatgccttgtacgcactcgaagctgtgcgggttttcactctgggtgccgtattgttcgatcaagagtcccaagtcgctaaggaggagagggaaacacctactactgatagtatgccgccactgcttcgacaagcttgggaactcaaagatcaccaaggtgcagagccagccttcctgttcggccttgaattgatcatacgcggattggagaagcagctgaagagagaaagtgggtct

SEQ ID NO: 1966 - DNA, 621 bp, Artificial Sequence
  synthetic construct; nucleotides encoding sulfonylurea responsive repressor
atggccagactcgacaagagcaaggtgatcaacagcgcactggagctgctgaacgaggtcggaatcgaaggcctcacaacccgtaagctcgcccagaagctcggggttgagcagcctacattgtactggcacgtcaagaacaagcgagctctgctagacgccttggccattgagatgatggataggcaccaaacccactactcgcctttggaaggggaaagctggcaagacttcttgaggaacaacgctaagagctgcagacgtgctttgctcagtcaccgtgatggagccaaggtctgcctaggtacacggtggacggagcaacagtatgaatctgcggagaacatgttggccttcctgacccaacaaggtttctcccttgagaatgccttgtacgcagtctccgctgtgcgggttttcactctgggtgccgtattgttcgatcaagagtcccaagtcgctaaggaggagagggaaacacctactactgatagtatgccgccactgcttcgacaagcttgggaactcaaagatcaccaaggtgcagagccagccttcctgttcggccttgaattgatcatacgcggattggagaagcagctgaagagagaatgtgggtct

SEQ ID NO: 1967 - DNA, 621 bp, Artificial Sequence
  synthetic construct; nucleotides encoding sulfonylurea responsive repressor
atggccagactcgacaagagcaaggtgatcaacagcgcactggagctgctgaacgaggtcggaatcgaaggcctcacaacccgtaagctcgcccagaagctcggggttgagcagcctacattgtactggcacgtcaagaacaagcgagctctgctagacgccttggccattgagatgatggataggcaccaaacccactactcgcctttggaaggggaaagctggcaagacttcttgaggaacaacgctaagagctgcagaaatgctttgctcagtcaccgtgatggagccaaggtctgcctaggtacacggtggacggagcaacagtatgaatctgcggagaacatgttggccttcctgacccaacaaggtttctcccttgagaatgccttgtacgcagtctccgctgtgcgggttttcactctgggtgccgtattgttcgatcaagagtcccaagtcgctaaggaggagagggaaacacctactactgatagtatgccgccactgcttcgacaagcttgggaactcaaagatcaccaaggtgcagagccagccttcctgttcggccttgaattgatcatatccggattggagaagcagctgaagtcagaaagtgggtct

SEQ ID NO: 1968 - DNA, 621 bp, Artificial Sequence
  synthetic construct; nucleotides encoding sulfonylurea responsive repressor
atggccagactcgacaagagcaaggtgatcaacagcgcactggagctgctgaacgaggtcggaatcgaaggcctcacaacccgtaagctcgcccagaagctcggggttgagcagcctacattgtactggcacgtcaagaacaagcgagctctgctagacgccttggccattgagatgatggataggcaccaaacccactacttgcctttggaaggggaaagctggcaagacttcttgaggaacaacgctaagagctgcagaaatgctttgctcagtcaccgtgatggagccaaggtctgcctaggtacacggtggacggagcaacagtatgaatctgcggagaacatgttggccttcctgacccaacaaggtttctcccttgagaatgccttgtacgcagtctccgctgtgcgggttttcactctgggtgccgtattgttcgatcaagagtcccaagtcgctaaggaggagagggaaacacctactactgatagtatgccgccactgcttcgacaagcttgggaactcaaagatcaccaaggtgcagagccagccttcctgttcggccttgaattgatcatatccggattggagaagcagctgaagagagaaagtgggtct

SEQ ID NO: 1969 - DNA, 621 bp, Artificial Sequence
  synthetic construct; nucleotides encoding sulfonylurea responsive repressor
atggccagactcgacaagagcaaggtgatcaacagcgcactggagctgctgaacgaggtcggaatcgaaggcctcacaacccgtaagctcgcccagaagctcggggttgagcagcctacattgtactggcacgtcaagaacaagcgagctctgctagacgccttggccattgagatgatggataggcaccaaacccactactcgcctttggaaggggaaagctggcaagacttcttgaggaacaacgctaagagcatgagatgtgctttgctcagtcaccgtgatggagccaaggtctgcctaggtacacggtggacggagcaacagtatgaatctgcggagaacatgttggccttcctgacccaacaaggtttctcccttgagaatgccttgtacgcagtctccgctgtgcgggttttcactctgggttgggtattgttcgatcaagagtcccaagtcgctaaggaggagagggaaacacctactactgatagtatgccgccactgcttcgacaagcttgggaactcaaagatcaccaaggtgcagagccagccttcctgttcggccttgaattgatcatagccggattggagaagcagctgaagagagaaagtgggtct

SEQ ID NO: 1970 - DNA, 621 bp, Artificial Sequence
  synthetic construct; nucleotides encoding sulfonylurea responsive repressor
atggccagactcgacaagagcaaggtgatcaacagcgcactggagctgctgaacgaggtcggaatcgaaggcctcacaacccgtaagctcgcccagaagctcggggttgagcagcctacattgtactggcacgtcaagaacaagcgagctctgctagacgccttggccattgagatgatggataggcaccaaacccactacttgcctttggaaggggaaagctggcaagacttcttgaggaacaacgctaagagctgcagacgtgctttgctcagtcaccgtgatggagccaaggtctgcctaggtacacggtggacggagcaacagtatgaatctgcggagaacatgttggccttcctgacccaacaaggtttctcccttgagaatgccttgtacgcagtctccgctgtgcgggttttcactctgggtgccgtattgttcgatcaagagtcccaagtcgctaaggaggagagggaaacacctactactgatagtatgccgccactgcttcgacaagcttgggaactcaaagatcaccaaggtgcagagccagccttcctgttcggccttgaattgatcatatccggattggagaagcagctgaagagagaaagtgggtct

SEQ ID NO: 1971 - DNA, 621 bp, Artificial Sequence
  synthetic construct; nucleotides encoding sulfonylurea responsive repressor
atggccagactcgacaagagcaaggtgatcaacagcgcactggagctgctgaacgaggtcggaatcgaaggcctcacaacccgtaagctcgcccagaagctcggggttgagcagcctacattgtactggcacgtcaagaacaagcgagctctgctagacgccttggccattgagatgatggataggcaccaaacccactacttgcctttggaaggggaaagctggcaagacttcttgaggaacaacgctaagagctgcagacgtgctttgctcagtcaccgtgatggagccaaggtctgcctaggtacacggtggacggagcaacagtatgaatctgcggagaacatgttggccttcctgacccaacaaggtttctcccttgagaatgccttgtacgcagtctccgctgtgcgggttttcactctgggttgggtattgttcgatcaagagtcccaagtcgctaaggaggagagggaaacacctactactgatagtatgccgccactgcttcgacaagcttgggaactcaaagatcaccaaggtgcagagccagccttcctgttcggccttgaattgatcatatccggattggagaagcagctgaagagagaaagtgggtct

SEQ ID NO: 1972 - DNA, 621 bp, Artificial Sequence
  synthetic construct; nucleotides encoding sulfonylurea responsive repressor
atggccagactcgacaagagcaaggtgatcaacagcgcactggagctgctgaacgaggtcggaatcgaaggcctcacaacccgtaagctcgcccagaagctcggggttgagcagcctacattgtactggcacgtcaagaacaagcgagctctgctagacgccttggccattgagatgttggataggcaccaaacccactactcgcctttggaaggggaaagctggcaagacttcttgaggaacaacgctaagagctgcagacgtgctttgctcagtcaccgtgatggagccaaggtctgcctaggtacacggtggacggagcaacagtatgaatctgcggagaacatgttggccttcctgacccaacaaggtttctcccttgagaatgccttgtacgcagtctccgctgtgcgggttttcactctgggtgccgtattgttcgatcaagagtcccaagtcgctaaggaggagagggaaacacctactactgatagtatgccgccactgcttcgacaagcttgggaactcaaagatcaccaaggtgcagagccagccttcctgttcggccttgaattgatcatagccggattggagaagcagctgaagtcagaaagtgggtct

SEQ ID NO: 1973 - DNA, 621 bp, Artificial Sequence
  synthetic construct; nucleotides encoding sulfonylurea responsive repressor
atggccagactcgacaagagcaaggtgatcaacagcgcactggagctgctgaacgaggtcggaatcgaaggcctcacaacccgtaagctcgcccagaagctcggggttgagcagcctacattgtactggcacgtcaagaacaagcgagctctgctagacgccttggccattgagatgatggataggcaccaaacccactacttgcctttggaaggggaaagctggcaagacttcttgaggaacaacgctaagagctgcagacgtgctttgctcagtcaccgtgatggagccaaggtctgcctaggtacacggtggacggagcaacagtatgaatctgcggagaacatgttggccttcctgacccaacaaggtttctcccttgagaatgccttgtacgcagtctccgctgtgcgggttttcactctgggtgccgtattgttcgatcaagagtcccaagtcgctaaggaggagagggaaacacctactactgatagtatgccgccactgcttcgacaagcttgggaactcaaagatcaccaaggtgcagagccagccttcctgttcggccttgaattgatcatacgcggattggagaagcagctgaagtcagaaagtgggtct

SEQ ID NO: 1974 - DNA, 621 bp, Artificial Sequence
  synthetic construct; nucleotides encoding sulfonylurea responsive repressor
atggccagactcgacaagagcaaggtgatcaacagcgcactggagctgctgaacgaggtcggaatcgaaggcctcacaacccgtaagctcgcccagaagctcggggttgagcagcctacattgtactggcacgtcaagaacaagcgagctctgctagacgccttggccattgagatgatggataggcaccaaacccactactcgcctttggaaggggaaagctggcaagacttcttgaggaacaacgctaagagctgcagaaatgctttgctcagtcaccgtgatggagccaaggtctgcctaggtacacggtggacggagcaacagtatgaatctgcggagaacatgttggccttcctgacccaacaaggtttctcccttgagaatgccatgtacgcactccaggctgtgcgggttttcactctgggttgggtattgttcgatcaagagtcccaagtcgctaaggaggagagggaaacacctactactgatagtatgccgccactgcttcgacaagcttgggaactcaaagatcaccaaggtgcagagccagccttcctgttcggccttgaattgatcatagccggattggagaagcagctgaagagagaaagtgggtct

SEQ ID NO: 1975 - DNA, 621 bp, Artificial Sequence
  synthetic construct; nucleotides encoding sulfonylurea responsive repressor
atggccagactcgacaagagcaaggtgatcaacagcgcactggagctgctgaacgaggtcggaatcgaaggcctcacaacccgtaagctcgcccagaagctcggggttgagcagcctacattgtactggcacgtcaagaacaagcgagctctgctagacgccttggccattgagatgatggataggcaccaaacccactactcgcctttggaaggggaaagctggcaagacttcttgaggaacaacgctaagagcttgagatgtgctttgctcagtcaccgtgatggagccaaggtctgcctaggtacacggtggacggagcaacagtatgaatctgcggagaacatgttggccttcctgacccaacaaggtttctcccttgagaatgccttgtacgcagtcgacgctgcgcgggttttcactctgggttgggtattgttcgatcaagagtcccaagtcgctaaggaggagagggaaacacctactactgatagtatgccgccactgcttcgacaagcttgggaactcaaagatcaccaaggtgcagagccagccttcctgttcggccttgaattgatcatacgcggattggagaagcagctgaagagagaaagtgggtct

SEQ ID NO: 1976 - DNA, 621 bp, Artificial Sequence
  synthetic construct; nucleotides encoding sulfonylurea responsive repressor
atggccagactcgacaagagcaaggtgatcaacagcgcactggagctgctgaacgaggtcggaatcgaaggcctcacaacccgtaagctcgcccagaagctcggggttgagcagcctacattgtactggcacgtcaagaacaagcgagctctgctagacgccttggccattgagatgatggataggcaccaaacccactactcgcctttggaaggggaaagctggcaagacttcttgaggaacaacgctaagagctgcagacgtgctttgctcagtcaccgtgatggagccaaggtctgcctaggtacacggtggacggagcaacagtatgaaactgcggagaacatgttggccttcctgacccaacaaggtttctcccttgagaatgccttgtacgcagtctccgctgtgcgggttttcactctgggtgccgtattgtttgatcaagagtcccaagtcgctaaggaggagagggaaacacctactactgatagtatgccgccactgcttcgacaagcttgggaactcaaagatcaccaaggtgcagagccagccttcctgttcggccttgaattgatcatatccggattggagaagcagctgaagtcagaaagtgggtct

SEQ ID NO: 1977 - DNA, 621 bp, Artificial Sequence
  synthetic construct; nucleotides encoding sulfonylurea responsive repressor
atggccagactcgacaagagcaaggtgatcaacagcgcactggagctgctgaacgaggtcggaatcgaaggcctcacaacccgtaagctcgcccagaagctcggggttgagcagcctacattgtactggcacgtcaagaacaagcgagctctgctagacgccttggccattgagatgatggataggcaccaaacccactacttgcctttggaaggggaaagctggcaagacttcttgaggaacaacgctaagagctgcagaaatgctttgctcagtcaccgtgatggagccaaggtctgcctaggtacacggtggacggagcaacagtatgaatctgcggagaacatgttggccttcctgacccaacaaggtttctcccttgagaatgccttgtacgcactcgacgctgtgcgggttttcactctgggtgccgtattgttcgatcaagagtcccaagtcgctaaggaggagagggaaacacctactactgatagtatgccgccactgcttcgacaagcttgggaactcaaagatcaccaaggtgcagagccagccttcctgttcggccttgaattgatcatacgcggattggagaagcagctgaagtcagaaagtgggtct

SEQ ID NO: 1978 - DNA, 621 bp, Artificial Sequence
  synthetic construct; nucleotides encoding sulfonylurea responsive repressor
atggccagactcgacaagagcaaggtgatcaacagcgcactggagctgctgaacgaggtcggaatcgaaggcctcacaacccgtaagctcgcccagaagctcggggttgagcagcctacattgtactggcacgtcaagaacaagcgagctctgctagacgccttggccattgagatgttggataggcaccaaacccactactcgcctttggaaggggaaagctggcaagacttcttgaggaacaacgctaagagctgcagacgtgctttgctcagtcaccgtgatggagccaaggtctgcctaggtacacggtggacggagcaacagtatgaatctgcggagaacatgttggccttcctgtgccaacaaggtttctcccttgagaatgccttgtacgcagtctccgctgtgcgggttttcactctgggtgccgtattgttcgatcaagagtcccaagtcgctaaggaggagagggaaacacctactactgatagtatgccgccactgcttcgacaagcttgggaactcaaagatcaccaaggtgcagagccagccttcctgttcggccttgaattgatcatacgcggattggagaagcagctgaaggcagaaagtgggtct

SEQ ID NO: 1979 - DNA, 621 bp, Artificial Sequence
  synthetic construct; nucleotides encoding sulfonylurea responsive repressor
atggccagactcgacaagagcaaggtgatcaacagcgcactggagctgctgaacgaggtcggaatcgaaggcctcacaacccgtaagctcgcccagaagctcggggttgagcagcctacattgtactggcacgtcaagaacaagcgagctctgctagacgccttggccattgagatgatggataggcaccaaacccactactcgcctttggaaggggaaagctggcaagacttcttgaggaacaacgctaagagcttcagatgtgctttgctcagtcaccgtgatggagccaaggtctgcctaggtacacggtggacggagcaacagtatgaatctgcggagaacatgttggccttcctgacccaacaaggtttctcccttgagaatgccttgtacgcactcaaggctgtgcggattttcactctgggtgccgtattgttcgatcaagagtcccaagtcgctaaggaggagagggaaacacctactactgatagtatgccgccactgcttcgacaagcttgggaactcaaagatcaccaaggtgcagagccagccttcctgttcggccttgaattgatcatagccggattggagaagcagctgaaggcagaaagtgggtct

SEQ ID NO: 1980 - DNA, 621 bp, Artificial Sequence
  synthetic construct; nucleotides encoding sulfonylurea responsive repressor
atggccagactcgacaagagcaaggtgatcaacagcgcactggagctgctgaacgaggtcggaatcgaaggcctcacaacccgtaagctcgcccagaagctcggggttgagcagcctacattgtactggcacgtcaagaacaagcgagctctgctagacgccttggccattgagatgatggataggcaccaaacccactactgccctttggaaggggaaagctggcaagacttcttgaggaacaacgctaagagcttgagatgtgctttgctcagtcaccgtgatggagccaaggtctgcctaggtacacggtggacggagcaacagtatgaatctgcggagaacatgttggccttcctgacccaacaaggtttctcccttgagaatgccttgtacgcactccaggctgtgcggattttcactctgggttgcgtattgtttgatcaagagtcccaagtcgctaaggaggagagggaaacacctactactgatagtatgccgccactgcttcgacaagcttgggaactcaaagatcaccaaggtgcagagccagccttcctgttcggccttgaattgatcatacgcggattggagaagcagctgaagagagaaagtgggtct

SEQ ID NO: 1981 - DNA, 621 bp, Artificial Sequence
  synthetic construct; nucleotides encoding sulfonylurea responsive repressor
atggccagactcgacaagagcaaggtgatcaacagcgcactggagctgctgaacgaggtcggaatcgaaggcctcacaacccgtaagctcgcccagaagctcggggttgagcagcctacattgtactggcacgtcaagaacaagcgagctctgctagacgccttggccattgagatgatggataggcaccaaacccactacttgcctttggaaggggaaagctggcaagacttcttgaggaacaacgctaagagcttgagatgtgctttgctcagtcaccgtgatggagccaaggtctgcctaggtacacggtggacggagcaacagtatgaatctgcggagaacatgttggccttcctgacccaacaaggtttctcccttgagaatgccttgtacgcactctcggctgtgcgggttttcactctgggttgggtattgttcgatcaagagtcccaagtcgctaaggaggagagggaaacacctactactgatagtatgccgccactgcttcgacaagcttgggaactcaaagatcaccaaggtgcagagccagccttcctgttcggccttgaattgatcatagccggattggagaagcagctgaagagagaaagtgggtct

SEQ ID NO: 1982 - DNA, 621 bp, Artificial Sequence
  synthetic construct; nucleotides encoding sulfonylurea responsive repressor
atggccagactcgacaagagcaaggtgatcaacagcgcactggagctgctgaacgaggtcggaatcgaaggcctcacaacccgtaagctcgcccagaagctcggggttgagcagcctacattgtactggcacgtcaagaacaagcgagctctgctagacgccttggccattgagatgatggataggcaccaaacccactacttgcctttggaaggggaaagctggcaagacttcttgaggaacaacgctaagagctgcagacgtgctttgctcagtcaccgtgatggagccaaggtctgcctaggtacacggtggacggagcaacagtatgaaactgcggagaacatgttggccttcctgacccaacaaggtttctcccttgagaatgccttgtacgcagtctccgctgtgcgggttttcactctgggtgccgtattgttcgatcaagagtcccaagtcgctaaggaggagagggaaacacctactactgatagtatgccgccactgcttcgacaagcttgggaactcaaagatcaccaaggtgcagagccagccttcctgttcggccttgaattgatcatagccggattggagaagcagctgaagagagaaagtgggtct

SEQ ID NO: 1983 - DNA, 621 bp, Artificial Sequence
  synthetic construct; nucleotides encoding sulfonylurea responsive repressor
atggccagactcgacaagagcaaggtgatcaacagcgcactggagctgctgaacgaggtcggaatcgaaggcctcacaacccgtaagctcgcccagaagctcggggttgagcagcctacattgtactggcacgtcaagaacaagcgagctctgctagacgccttggccattgagatgatggataggcaccaaacccactactcgcctttggaaggggaaagctggcaagacttcttgaggaacaacgctaagagctgcagacgtgctttgctcagtcaccgtgatggagccaaggtctgcctaggtacacggtggacggagcaacagtatgaatctgcggagaacatgttggccttcctgtgccaacaaggtttctcccttgagaatgccttgtacgcagtctccgctgtgcggattttcactctgggtgccgtattgttcgatcaagagtcccaagtcgctaaggaggagagggaaacacctactactgatagtatgccgccactgcttcgacaagcttgggaactcaaagatcaccaaggtgcagagccagccttcctgttcggccttgaattgatcatagccggattggagaagcagctgaagagagaaagtgggtct

SEQ ID NO: 1984 - DNA, 621 bp, Artificial Sequence
  synthetic construct; nucleotides encoding sulfonylurea responsive repressor
atggccagactcgacaagagcaaggtgatcaacagcgcactggagctgctgaacgaggtcggaatcgaaggcctcacaacccgtaagctcgcccagaagctcggggttgagcagcctacattgtactggcacgtcaagaacaagcgagctctgctagacgccttggccattgagatgatggataggcaccaaacccactactgccctttggaaggggaaagctggcaagacttcttgaggaacaacgctaagagctgcagaaatgctttgctcagtcaccgtgatggagccaaggtctgcctaggtacacggtggacggagcaacagtatgaatctgcggagaacatgttggccttcctgacccaacaaggtttctcccttgagaatgccatgtacgcactcaaggctgtgcggattttcactctgggttgcgtattgtgggatcaagagtcccaagtcgctaaggaggagagggaaacacctactactgatagtatgccgccactgcttcgacaagcttgggaactcaaagatcaccaaggtgcagagccagccttcctgttcggccttgaattgatcatacgcggattggagaagcagctgaagagagaaagtgggtct

SEQ ID NO: 1985 - DNA, 621 bp, Artificial Sequence
  synthetic construct; nucleotides encoding sulfonylurea responsive repressor
atggccagactcgacaagagcaaggtgatcaacagcgcactggagctgctgaacgaggtcggaatcgaaggcctcacaacccgtaagctcgcccagaagctcggggttgagcagcctacattgtactggcacgtcaagaacaagcgagctctgctagacgccttggccattgagatgatggataggcaccaaacccactactcgcctttggaaggggaaagctggcaagacttcttgaggaacaacgctaagagctgcagaaatgctttgctcagtcaccgtgatggagccaaggtcgtgctaggtacacggtggacggagcaacagtatgaatctgcggagaacatgttggccttcctgacccaacaaggtttctcccttgagaatgccatgtacgcactcgaagctgcgcggattttcactctgggttgggtattgttcgatcaagagtcccaagtcgctaaggaggagagggaaacacctactactgatagtatgccgccactgcttcgacaagcttgggaactcaaagatcaccaaggtgcagagccagccttcctgttcggccttgaattgatcatacgcggattggagaagcagctgaagtcagaaagtgggtct

SEQ ID NO: 1986 - DNA, 621 bp, Artificial Sequence
  synthetic construct; nucleotides encoding sulfonylurea responsive repressor
atggccagactcgacaagagcaaggtgatcaacagcgcactggagctgctgaacgaggtcggaatcgaaggcctcacaacccgtaagctcgcccagaagctcggggttgagcagcctacattgtactggcacgtcaagaacaagcgagctctgctagacgccttggccattgagatgatggataggcaccaaacccactactcgcctttggaaggggaaagctggcaagacttcttgaggaacaacgctaagagcttgagatgtgctttgctcagtcaccgtgatggagccaaggtctgcctaggtacacggtggacggagcaacagtatgaatctgcggagaacatgttggccttcctgacccaacaaggtttctcccttgagaatgccttgtacgcactcacggctgtgcgggttttcactctgggttgggtattgttcgatcaagagtcccaagtcgctaaggaggagagggaaacacctactactgatagtatgccgccactgcttcgacaagcttgggaactcaaagatcaccaaggtgcagagccagccttcctgttcggccttgaattgatcatagccggattggagaagcagctgaagagagaaagtgggtct

SEQ ID NO: 1987 - DNA, 639 bp, Artificial Sequence
  synthetic construct; nucleotides encoding sulfonylurea responsive repressor
atggccagactcgacaagagcaaggtgatcaacagcgcactggagctgctgaacgaggtcggaatcgaaggcctcacaacccgtaagctcgcccagaagctcggggttgagcagcctacattgtactggcacgtcaagaacaagcgagctctgctagacgccttggccattgagatgatggataggcaccagacccactacttgcctttggaaggggaaagctggcaagacttcttgaggaacttcgctaagagcatgcgacgtgctttgctcagtcaccgtgatggagccaaggtctcgcttggtacacggtggacggagcaacagtatgaaactgcagagaacatgttggccttcctgacccaacaaggtttcccccttgagaatgccttgtacgcaaccgacgctgtgcgtgttttcactctgggtgccgtattgcaagatcaagagggccaagtcgctaaggaggagagggaaacacctactactgatagtatgccgccactgcttcgacaagcctgggaactcaaagatcaccaaggtgcagagccagccttcctgttcggccttgaattgatcatagccggattggagaagcagctgaagagagaaagtgggtctcaccatcaccaccatcac

SEQ ID NO: 1988 - DNA, 639 bp, Artificial Sequence
  synthetic construct; nucleotides encoding sulfonylurea responsive repressor
atggccagactcgacaagagcaaggtgatcaacagcgcactggagctgctgaacgaggtcggaatcgaaggcctcacaacccgtaagctcgcccagaagctcggggttgagcagcctacattgtactggcacgtcaagaacaagcgagctctgctagacgccttggccattgagatgcatgataggcaccagacccactacttgcctttggaaggggaaagctggcaagacttcttgaggaacttcgctaagagcatgcgacgtgctttgctcagtcaccgtgatggagccaaggtctcgcttggtacacggtggacggagcaacagtatgaaactgcagagaacatgttggccttcctgacccaacaaggtttctcccttgagaatgccttgtacgcaacctcagctgtgcgtgttttcactctgggtgccgtattgcaagatcaagagcagcaagtcgctaaggaggagagggaaacacctactcctgatagtatgccgccactgcttcgacaagcctgggaactcaaagatcaccaaggtgcagagccagccttcctgttcggccttgaattgatcatagccggattggagaagcagctgaagagagaaagtgggtctcaccatcaccaccatcac

SEQ ID NO: 1989 - DNA, 639 bp, Artificial Sequence
  synthetic construct; nucleotides encoding sulfonylurea responsive repressor
atggccagactcgacaagagcaaggtgatcaacagcgcactggagctgctgaacgaggtcggaatcgaaggcctcacaacccgtaagctcgcccagaagctcggggttgagcagcctacattgtactggcacgtcaagaacaagcgagctctgctagacgccttggccattgagatgatggataggcaccagacccactacttgcctttggaaggggaaagctggcaagacttcttgaggaactacgctaagagcatgcgacgtgctttgctcagtcaccgtgatggagccaaggtcgcgcttggtacacggtggacggagcaacagtatgaaactgcagagaacatgttggccttcctgacccaacaaggtttctcacttgagaatgccttgtacgcaacctcagctgtgcgtgttttcactctgggtgccgtattgcaagatcaagagggccaagtcgctaaggaggagagggaaacacctactactgatagtatgccgccactgcttcgacaagcctgggaactcaaagatcaccaaggtgcagagccagccttcctgttcggccttgaattgatcatagccggattggagaagcagctgaagagagaaagtgggtctcaccatcaccaccatcac

SEQ ID NO: 1990 - DNA, 639 bp, Artificial Sequence
  synthetic construct; nucleotides encoding sulfonylurea responsive repressor
atggccagactcgacaagagcaaggtgatcaacagcgcactggagctgctgaacgaggtcggaatcgaaggcctcacaacccgtaagctcgcccagaagctcggggttgagcagcctacattgtactggcacgtcaagaacaagcgagctctgctagacgccttggccattgagatgatggataggcaccagacccactacttgcctttggaaggggaaagctggcaagacttcttgaggaacttcgctaagagcatgcgacgtgctttgctcagtcaccgtgatggagccaaggtcgcgcttggtacacggtggacggagcaacagtatgaaactgcagagaacatgttggccttcctgacccaacaaggtttctcccttgagaatgccttgtacgcaacctcagctgtgcgtgttttcactctgggtgccgtattgttggatcaagagcagcaagtcgctaaggaggagagggaaacacctactactgatagtatgccgccactgcttcgacaagcctgggaactcaaagatcaccaaggtgcagagccagccttcctgttcggccttgaattgatcatagccggattggagaagcagctgaagagagaaagtgggtctcaccatcaccaccatcac

SEQ ID NO: 1991 - DNA, 639 bp, Artificial Sequence
  synthetic construct; nucleotides encoding sulfonylurea responsive repressor
atggccagactcgacaagagcaaggtgatcaacagcgcactggagctgctgaacgaggtcggaatcgaaggcctcacaacccgtaagctcgcccagaagctcggggttgagcagcctacattgtactggcacgtcaagaacaagcgagctctgctagacgccttggccattgagatgatggataggcacggcacccactacttgcctttggaaggggaaagctggcaagacttcttgaggaactacgctaagagcatgcgacgtgctttgctcagtcaccgtgatggagccaaggtcgcgcttggtacacggtggacggagcaacagtatgaaactgcagagaacatgttggccttcctgacccaacaaggtttctcccttgagaatgccttgtacgcaaccggcgctgtgcgtattttcactctgggtgccgtattgcaagatcaagagagccaagtcgctaaggaggagagggaaacacctactactgatagtatgccgccactgcttcgacaagcctgggaactcaaagatcaccaaggtgcagagccagccttcctgttcggccttgaagtgatcatagccggattggagaagcagctgaagagagaaagtgggtctcaccatcaccaccatcac

SEQ ID NO: 1992 - DNA, 603 bp, Artificial Sequence
  synthetic construct; nucleotides encoding sulfonylurea responsive repressor
atggccagactcgacaagagcaaggtgatcaacagcgcactggagctgctgaacgaggtcggaatcgaaggcctcacaacccgtaagctcgcccagaagctcggggttgagcagcctacattgtactggcacgtcaagaacaagcgagctctgctagacgccttggccattgagatgcatgataggcacggcacccactacttgcctttggaaggggaaagctggcaagacttcttgaggaacttcgctaagagcatgcgacgtgctttgctcagtcaccgtgatggagccaaggtctcgcttggtacacggtggacggagcaacagtatgaaactgcagagaacatgttggccttcctgacccaacaaggtttctcccttgagaatgccttgtacgcaacctcagctgtgcgtgttttcactctgggtgccgtattgctagatcaagagcagcaagtcgctaaggaggagagggaaacacctactactgatagtatgccgccactgcttcgacaagcctgggaactcaaagatcaccaaggtgcagagccagccttcctgttcggccttgaattgatcatagccggattggagaagcagctg

SEQ ID NO: 1993 - DNA, 639 bp, Artificial Sequence
  synthetic construct; nucleotides encoding sulfonylurea responsive repressor
atggccagactcgacaagagcaaggtgatcaacagcgcactggagctgctgaacgaggtcggaatcgaaggcctcacaacccgtaagctcgcccagaagctcggggttgagcagcctacattgtactggcacgtcaagaacaagcgagctctgctagacgccttggccattgagatgatggataggcacggcacccactacttgcctttggaaggggaaagctggcaagacttcttgaggaacttcgctaagagcatgcgacgtgctttgctcagtcaccgtgatggagccaaggtctcgcttggtacacggtggacggagcaacagtatgaaactgcagagaacatgttggccttcctgacccaacaaggtttctcccttgagaatgccttgtacgcaacctcagctgtgcgtgttttcactctgggtgccgtattgcaagatcaagagagccaagtcgctaaggaggagagggaaacacctactactgatagtatgccgccactgcttcgacaagcctgggaactcaaagatcaccaaggtgcagagccagccttcctgttcggccttgaattgatcatagccggattggagaagcagctgaagagagaaagtgggtctcaccatcaccaccatcac

SEQ ID NO: 1994 - DNA, 639 bp, Artificial Sequence
  synthetic construct; nucleotides encoding sulfonylurea responsive repressor
atggccagactcgacaagagcaaggtgatcaacagcgcactggagctgctgaacgaggtcggaatcgaaggcctcacaacccgtaagctcgcccagaagctcggggttgagcagcctacattgtactggcacgtcaagaacaagcgagctctgctagacgccttggccattgagatgcatgataggcaccagacccactacttgcctttggaaggggaaagctggcaagacttcttgaggaacttcgctaagagcatgcgacgtgctttgctcagtcaccgtgatggagccaaggtctcgcttggtacacggtggacggagcaacagtatgaaactggagagaacatgttggccttcctgacccaacaaggtttctcccttgagaatgccttgtacgcagtggacgctgtgcgtgttttcactctgggtgccgtattgcaagatcaagagggccaagtcgctaaggaggatagggaaacacctactactgatagtatgccgccactgcttcgacaagcctgggaactcaaagatcaccaaggtgcagagccagccttcctgttcggccttgaattgatcatagccggattggagaagcagctgaagagagaaagtgggtctcaccatcaccaccatcac

SEQ ID NO: 1995 - DNA, 639 bp, Artificial Sequence
  synthetic construct; nucleotides encoding sulfonylurea responsive repressor
atggccagactcgacaagagcaaggtgatcaacagcgcactggagctgctgaacgaggtcggaatcgaaggcctcacaacccgtaagctcgcccagaagctcggggttgagcagcctacattgtactggcacgtcaagaacaagcgagctctgctagacgccttggccattgagatgatggataggcaccagacccactacttgcctttggaaggggaaagctggcaagacttcttgaggaactacgctaagagcatgcgacgtgctttgctcagtcaccgtgatggagccaaggtctcgcttggtacacggtggacggagcaacagtatgaaactgcagagaacatgttggccttcctgacccaacaaggtttctcccttgagaatgccttgtacgcaacctcagctgtgcgtgttttcactctgggtgccgtattgcaagatcaagagggccaagtcgctaatgaggagagggaaacacctactactgatagtatgccgccactgcttcgacaagcctgggaactcaaagatcaccaaggtgcagagccagccttcctgttcggccttgaattgatcatagccggattggagaagcagctgaagagagaaagtgggtctcaccatcaccaccatcac

SEQ ID NO: 1996 - DNA, 639 bp, Artificial Sequence
  synthetic construct; nucleotides encoding sulfonylurea responsive repressor
atggccagactcgacaagagcaaggtgatcaacagcgcactggagctgctgaacgaggtcggaatcgaaggcctcacaacccgtaagctcgcccagaagctcggggttgagcagcctacattgtactggcacgtcaagaacaagcgagctctgctagacgccttggccattgagatgatggataggcaccagacccactacttgcctttggaaggggaaagctggcaagacttcttgaggaacttcgctaagagcatgcgacgtgctttgctcagtcaccgtgatggagccaaggtctcgcttggtacacggtggacggagcaacagtatgaaactgcagagaacatgttggccttcctgacccaacaaggtttctcccttgagaatgccttgtacgcaacctcagctgtgcgtgttttcactctgggtgccgtattgcaagatcaagagagccaagtcgctaaggaggagagggaaacacctactactgatagtatgccgccactgcttcgacaagcctgggaactcaaagatcaccaaggtgcagagccagccttcctgttcggccttgaattgatcatagctggattggagaagcagctgaacagagaaagtgggtctcaccatcaccaccatcac

SEQ ID NO: 1997 - DNA, 639 bp, Artificial Sequence; identical to SEQ ID NO: 1987
  synthetic construct; nucleotides encoding sulfonylurea responsive repressor

SEQ ID NO: 1998 - DNA, 639 bp, Artificial Sequence
  synthetic construct; nucleotides encoding sulfonylurea responsive repressor
atggccagactcgacaagagcaaggtgatcaacagcgcactggagctgctgaacgaggtcggaatcgaaggcctcacaacccgtaagctcgcccagaagctcggggttgagcagcctacattgtactggcacgtcaagaacaagcgagctctgctagacgccttggccattgagatgcatgataggcaccagacccactacttgcctttggaaggggaaagctggcaagacttcttgaggaacttcgctaagagcatgcgacgtgctttgctcagtcaccgtgatggagccaaggtctcgcttggtacacggtggacggagcaacagtatgaaactgcagagaacatgttggccttcctgacccaacaaggtttctcccttgagaatgccttgtacgcaacctcagctgtgcgtgttttcactctgggtgccgtattgcaagatcaagagagccaagtcgctaaggaggagagggaaacacctactactgatagtatgccgccactgcttcgacaagcctgggaactcaaagatcaccaaggtgcagagccagccttcctgttcggccttgaattgatcatagccggattggagaagcagctgaagagagaaagtgggtctcaccatcaccaccatcac

SEQ ID NO: 1999 - DNA, 639 bp, Artificial Sequence
  synthetic construct; nucleotides encoding sulfonylurea responsive repressor
atggccagactcgacaagagcaaggtgatcaacagcgcactggagctgctgaacgaggtcggaatcgaaggcctcacaacccgtaagctcgcccagaagctcggggttgagcagcctacattgtactggcacgtcaagaacaagcgagctctgctagacgccttggccattgagatgaatgataggcaccagacccactacttgcctttggaaggggaaagctggcaagacttcttgaggaacttcgctaagagcatgcgacgtgctttgctcagtcaccgtgatggagccaaggtctcgcttggtacacggtggacggagcaacagtatgaaactgcagagaacatgttggccttcctgacccaacaaggtttctcccttgagaatgccttgtacgcaacctcagctgtgcgtgttttcactctgggtgccgtattgcaagatcaagagagccaagtcgctaaggaggagagggaaacacctactactgatagtatgccgccactgcttcgacaagcctgggaactcaaagatcaccaaggtgcagagccagccttcctgttcggccttgaattgatcatagccggattggagaagcagctgaagagagaaagtgggtctcaccatcaccaccatcac

SEQ ID NO: 2000 - DNA, 639 bp, Artificial Sequence
  synthetic construct; nucleotides encoding sulfonylurea responsive repressor
atggccagactcgacaagagcaaggtgatcaacagcgcactggagctgctgaacgaggtcggaatcgaaggcctcacaacccgtaagctcgcccagaagctcggggttgagcagcctacattgtactggcacgtcaagaacaagcgagctctgctagacgccttggccattgagatgatggataggcacagcacccactacttgcctttggaaggggaaagctggcaagacttcttgaggaacttcgctaagagcatgcgacgtgctttgctcagtcaccgtgatggagccaaggtcgcgcttggtacacggtggacggagcaacagtatgaaactggagagaacatgttggccttcctgacccaacaaggtttctcccttgagaatgccttgtacgcaacctcagctgtgcgtgttttcactctgggtgccgtattgcaagatcaagagagccaagtcgctaaggaggagagggaaacacctactactgatagtatgccgccactgcttcgacaagcctgggaactcaaagatcaccaaggtgcagagccagccttcctgttcggccttgaattgatcatagccggattggagaagcagctgaagagagaaagtgggtctcaccatcaccaccatcac

SEQ ID NO: 2001 - DNA, 639 bp, Artificial Sequence
  synthetic construct; nucleotides encoding sulfonylurea responsive repressor
atggccagactcgacaagagcaaggtgatcaacagcgcactggagctgctgaacgaggtcggaatcgaaggcctcacaacccgtaagctcgcccagaagctcggggttgagcagcctacattgtactggcacgtcaagaacaagcgagctctgctagacgccttggccattgagatgatggataggcaccagacccactacttgcctttggaaggggaaagctggcaagacttcttgaggaactacgctaagagcatgcgacgtgctttgctcagtcaccgtgatggagccaaggtcgcgcttggtacacggtggacggagcaacagtatgaaactgcagagaacatgttggccttcctgacccaacaaggtttctcccttgagaatgccttgtacgcaacctcagctgtgcgtgttttcactctgggtgccgtattgcaagatcaagagggccaagtcgctaaggaggagagggaaacacctactactgatagtatgccgccactgcttcgacaagcctgggaactcaaagatcaccaaggtgccgagccagccttcctgttcggccttgaattgatcatagccggattggagaagcagctgaagagagaaagtgggtctcaccatcaccaccatcac

SEQ ID NO: 2002 - DNA, 639 bp, Artificial Sequence
  synthetic construct; nucleotides encoding sulfonylurea responsive repressor
atggccagactcgacaagagcaaggtgatcaacagcgcactggagctgctgaacgaggtcggaatcgaaggcctcacaacccgtaagctcgcccagaagctcggggttgagcagcctacattgtactggcacgtcaagaacaagcgagctctgctagacgccttggccattgagatgatggataggcaccagacccactacttgcctttggaaggggaaagctggcaagacttcttgaggaacttcgctaagagcatgcgacgtgctttgctcagtcaccgtgatggagccaaggtcgcgcttggtacacggtggacggagcaacagtatgaaactgcagagaacatgttggccttcctgacccaacaaggtttctcccttgagaatgccttgtacgcaacctcagctgtgcgtgttttcactctgggtgccgtattgcaagatcaagagggccaagtcgctaaggaggagagggaaacacctactactgatagtatgccgccactgcttcgtcaagcctgggaactcaaagatcaccaaggtgcagagccagccttcctgttcggccttgaattgatcatagccggattggagaagcagctgaagagagaaagtgggtctcaccatcaccaccatcac

SEQ ID NO: 2003 - DNA, 639 bp, Artificial Sequence
  synthetic construct; nucleotides encoding sulfonylurea responsive repressor
atggccagactcgacaagagcaaggtgatcaacagcgcactggagctgctgaacgaggtcggaatcgaaggcctcacaacccgtaagctcgcccagaagctcggggttgagcagcctacattgtactggcacgtcaagaacaagcgagctctgctagacgccttggccattgagatgcatgataggcaccagacccactacttgcctttggaaggggaaagctggcaagacttcttgaggaacttcgctaagagcatgcgacgtgctttgctcagtcaccgtgatggagccaaggtcgcgcttggtacacggtggacggagcaacagtatgaaactggagagaacatgttggccttcctgacccaacaaggtttctcccttgagaatgccttgtacgcaacctcagctgtgcgtgttttcactctgggtgccgtattgcaagatcaagagggccaagtcgctaaggaggagagggaaacaccaactactgatagtatgccgccactgcttcgacaagcctgggaactcaaagatcaccaaggtgcagagccagccttcctgttcggccttgaattgatcatagccggattggagaagcagctgaagagagaaagtgggtctcaccatcaccaccatcac

SEQ ID NO: 2004 - DNA, 639 bp, Artificial Sequence
  synthetic construct; nucleotides encoding sulfonylurea responsive repressor
atggccagactcgacaagagcaaggtgatcaacagcgcactggagctgctgaacgaggtcggaatcgaaggcctcacaacccgtaagctcgcccagaagctcggggttgagcagcctacattgtactggcacgtcaagaacaagcgagctctgctagacgccttggccattgagatgcatgataggcacagaacccactacttgcctttggaaggggaaagctggcaagacttcttgaggaactacgctaagagcatgcgacgtgctttgctcagtcaccgtgatggagccaaggtctcgcttggtacacggtggacggagcaacagtatgaaactgcagagaacatgttggccttcctgacccaacaaggtttctcccttgagaatgccttgtacgcaacctcagctgtgcgtgttttcactctgggtgccgtattggtggatcaagagcagcaagtcgctaaggaggagacggaaacacctactactgatagtatgccgccactgcttcgacaagcctgggaactcaaagatcaccaaggtgcagagccagccttcctgttcggtcttgaattgatcatagccggattggagaagcagctgaagagagaaagtgggtctcaccatcaccaccatcac

SEQ ID NO: 2005 - DNA, 639 bp, Artificial Sequence
  synthetic construct; nucleotides encoding sulfonylurea responsive repressor
atggccagactcgacaagagcaaggtgatcaacagcgcactggagctgctgaacgaggtcggaatcgaaggcctcacaacccgtaagctcgcccagaagctcggggttgagcagcctacattgtactggcacgtcaagaacaagcgagctctgctagacgccttggccattgagatgatggataggcaccagacccactacttgcctttggaaggggaaagctggcaagacttcttgaggaacttcgctaagagcatgcgacgtgctttgctcagtcaccgtgatggagccaaggtctcgcttggtacacggtggacggagcaacagtatgaaactgcagagaacatgttggccttcctgatccaacaaggtttctcccttcagaatgccttgtacgcactgtcagctgtgcgtgttttcactctgggtgccgtattgcaagatcaagagagccaagtcgctaaggaggagagggaaacacctactactgatagtatgccgccactgcttcgacaagcctgggaactcaaagatcaccaaggtgcagagccagccttcctgttcggccttgaattgatcatagccggattggagaagcagctgaagagagaaagtgggtctcaccatcaccaccatcac

SEQ ID NO: 2006 - DNA, 639 bp, Artificial Sequence
  synthetic construct; nucleotides encoding sulfonylurea responsive repressor
atggccagactcgacaagagcaaggtgatcaacagcgcactggagctgctgaacgaggtcggaatcgaaggcctcacaacccgtaagctcgcccagaagctcggggttgagcagcctacattgtactggcacgtcaagaacaagcgagctctgctagacgccttggccattgagatgatggataggcaccagacccactacttgcctttggaaggggaaagctggcaagacttcttgaggaactacgctaagagcatgcgacgtgctttgctcagtcaccgtgatggagccaaggtcgcgcttggtacacggtggacggagcaacagtatgaaactgcagagaacatgttggccttcctgacccaacaaggtttctcccttgagaatgccttgtacgcaaccggcgctgtgcgtgttttcactctgggtgccgtattgcaagatcaagagagccatgtcgctaaggtggagagggaaacacctactactgatagtatgccgccactgcttcgacaagcctgggaactcaaagatcaccaaggtgcagagccagccttcctgttcggccttgaattgatcatagccggattggagaagcagctgaagagagaaagtgggtctcaccatcaccaccatcac

SEQ ID NO: 2007 - DNA, 603 bp, Artificial Sequence
  synthetic construct; nucleotides encoding sulfonylurea responsive repressor
atggccagactcgacaagagcaaggtgatcaacagcgcactggagctgctgaacgaggtcggaatcgaaggcctcacaacccgtaagctcgcccagaagctcggggttgagcagcctacattgtactggcacgtcaagaacaagcgagctctgctagacgccttggccattgagatgcatgataggcacggcacccactacttgcctttggaaggggaaagctggcaagacttcttgaggaacttcgctaagagcatgcgacgtgctttgctcagtcaccgtgatggagccaaggtctcgcttggtacacggtggacggagcaacagtatgaaactgcagagaacatgttggccttcctgacccaacaaggtttctcccttgagaatgccttgtacgcaacctcagctgtgcgtgttttcactctgggtgccgtattgctagatcaagagcagcaagtcgctaaggaggagagggaaacacctactactgatagtatgccgccactgcttcgacaagcctgggaactcaaagttcaccaaggtgcagagccagccttcctgttcggccttgaattgatcatagccggattggagaagcagctg

SEQ ID NO: 2008 - DNA, 603 bp, Artificial Sequence
  synthetic construct; nucleotides encoding sulfonylurea responsive repressor
atggccagactcgacaagagcaaggtgatcaacagcgcactggagctgctgaacgaggtcggaatcgaaggcctcacaacccgtaagctcgcccagaagctcggggttgagcagcctacattgtactggcacgtcaagaacaagcgagctctgctagacgccttggccattgagatgcatgataggcacggcacccactacttgcctttggaaggggaaagctggcaagacttcttgaggaacttcgctaagagcatgcgatgtgctttgctcagtcaccgtgatggagccaaggtctcgcttggtacacggtggacggagcaacagtatgaaactgcagagaacatgttggccttcctgacccaacaaggtttctcacttgagaatgccttgtacgcaacctcagctgtgcgtgttttcactctgggtgccgtattgctagatcaagagcagcaagtcgctaaggaggagagggaaacacctactactgatagaatgccgccactgcttcgacaagcctgggaactcaaagatcaccaaggtgcagagccagccttcctgttcggccttgaattgatcatagccggattggagaagcagctg

SEQ ID NO: 2009 - DNA, 603 bp, Artificial Sequence
  synthetic construct; nucleotides encoding sulfonylurea responsive repressor
atggccagactcgacaagagcaaggtgatcaacagcgcactggagctgctgaacgaggtcggaatcgaaggcctcacaacccgtaagctcgcccagaagctcggggttgagcagcctacattgtactggcacgtcaagaacaagcgagctctgctagacgccttggccattgagatgcacgataggcacggcacccactacttgcctttggaaggggaaagctggcaagactacttgaggaacttcgctaagagcatgcgacgtgctttgctcagtcaccgtgatggagccaaggtctcgcttggtacacggtggacggagcaacagtatgaaactgcggagaacatgttggccttcctgacccaacaaggtttctcccttgagaatgccttgtacgcaacctcagctgtgcgtgttttcactctgggtgccgtattgctagatcaagagcagcaagtcgctaaggaggagagggaaacacctactactgatagtatgccgccactgcttcgacaagcctgggaactcaaagaacaccaaggtgcagagccagccttcctgttcggccttgaattgatcatagccggattggagaagcagctg

SEQ ID NO: 2010 - DNA, 603 bp, Artificial Sequence
  synthetic construct; nucleotides encoding sulfonylurea responsive repressor
atggccagactcgacaagagcaaggtgatcaacagcgcactggagctgctgaacgaggtcggaatcgaaggcctcacaacccgtaagctcgcccagaagctcggggttgagcagcctacattgtactggcacgtcaagaacaagcgagctctgctagacgccttggccattgagatgcatgataggcacggcacccactacttgcctttggaaggggaaagctggcaagacttcttgaggaacttcgctaagagcatgcgacgtgctttgctcagtcaccgtgatggagccaaggtctcgcttggtacacggtggacggagcaacagtatgaaactgcagagaacatgttggccttcctgacccaacaaggtttctcccttgagaatgccttgtacgcaacctcagctgtgcgtgttttcactctgggtgccgtattgctagatcaagagcagcaagtcgctaaggaggagagggaaacacctactactgatagtatgccgccactgcttcgacaagcctgggaactcaaagaacaccaaggtgcagagccggccttcctgttcggccttgaattgatcatagccggattggagaagcagctg

SEQ ID NO: 2011 - DNA, 639 bp, Artificial Sequence
  synthetic construct; nucleotides encoding sulfonylurea responsive repressor
atggccagactcgacaagagcaaggtgatcaacagcgcactggagctgctgaacgaggtcggaatcgaaggcctcacaacccgtaagctcgcccagaagctcggggttgagcagcctacattgtactggcacgtcaagaacaagcgagctctgctagacgccttggccattgagatgcatgataggcaccaaacccactacttgcctttggaaggggaaagctggcaagactatttgaggaactttgctaagagcatgcgacgagctttgctcagtcaccgtgatggagccaaggtcgcccttggtacacggtggacggagcaacagtatgaaactgcggagaacatgttggccttcctgacccaacaaggtttctcccttgagaatgccttgtacgcaacagatgctgtgcgggttttcactctgggtgccgtattgctggatcaagagggacaagtcgctaaggaggagagggaaacacctactactgatagtatgccgccactgcttcgacaagcctgggaactcaaagtgcaccaaggtgcagagccagccttcctgttcggccttgaattgatcatagccggattggagaagcagctgaagagagaaagtgggtctcaccatcaccaccatcac

SEQ ID NO: 2012 - DNA, 639 bp, Artificial Sequence
  synthetic construct; nucleotides encoding sulfonylurea responsive repressor
atggccagactcgacaagagcaaggtgatcaacagcgcactggagctgctgaacgaggtcggaatcgaaggcctcacaacccgtaagctcgcccagaagctcggggttgagcagcctacattgtactggcacgtcaagaacaagcgagctctgctagacgccttggccattgagatgcatgataggcaccaaacccactacttgcctttggaaggggagagctggcaagactttttgaggaactttgctaagagcatgcgatgcgctttgctcagtcaccgtgatggagccaaggtcgcccttggtacacggtggacggagcaacagtatgaaactgcggagaacatgttggccttcctgacccaacaaggtttctcccttgagaatgccttgtacgcaacagatgctgtgcgggttttcactctgggtgccgtattgctggatcaagagcaacaagtcgctaatgaggggagggaaacacctactactgatagtatgccgccactgcttcgacaagcctgggaactcaaagagcaccaaggtgcagagccagccttcctgttcggccttgaattgatcatagccggattggagaagcagctgaagagagaaagtgggtctcaccatcaccaccatcac

SEQ ID NO: 2013 - DNA, 639 bp, Artificial Sequence
  synthetic construct; nucleotides encoding sulfonylurea responsive repressor
atggccagactcgacaagagcaaggtgatcaacagcgcactggagctgctgaacgaggtcggaatcgaaggcctcacaacccgtaagctcgcccagaagctcggggttgagcagcctacattgtactggcacgtcaagaacaagcgagctctgctagacgccttggccattgagatgcatgataggcaccaaacccactacttgcctttggaaggggaaagctggcaagactatttgaggaactttgctaagagcatgcgatgcgctttgctcagtcaccgtgatggagccaagatcgcccttggtacacggtggacggagcaacagtatgaaactgcggagaacatgttggccttcctgacccaacaaggtttctcccttgagaatgccttgtacgcaacagatgctgtgcgggttttcactctgggtgccgtattgctggatcaagagcaacaagtcgctaaggaggagagggaaacacctactcctgatagtatgccgccactgcttcgacaagcctgggaactcaaagttcaccaaggtgcagagccagccttcctgttcggccttgaattgatcatagccggattggagaagcagctgaagagagaaagtgggtctcaccatcaccaccatcac

SEQ ID NO: 2014 - DNA, 639 bp, Artificial Sequence
  synthetic construct; nucleotides encoding sulfonylurea responsive repressor
atggccagactcgacaagagcaaggtgatcaacagcgcactggagctgctgaacgaggtcggaatcgaaggcctcacaacccgtaagctcgcccagaagctcggggttgagcagcctacattgtactggcacgtcaagaacaagcgagctctgctagacgccttggccattgagatgatggataggcaccaaacccactacttgcctttggaaggggaaagctggcaagactttttgaggaactttgctaagagcatgcgacgagctttgctcagtcaccgtgatggagccaaggtcgcccttggtacacggtggacggagcaacagtatgaaactgcggagaacatgttggccttcctgacccaacatggtttctcccttgagaatgccttgtacgcaacagatgctgtgcgggttttcactctgggtgccgtattgctggatcaagagcaacaagtcgctaaggaggagagggaaacacctactcctgatagtatgccgccactgcttcgacaagcctgggaactcaaagtgcaccaaggtgcagagccagccttcctgttcggccttgaattgatcatagccggattggagaagcagctgaagagagaaagtgggtctcaccatcaacaccatcac

SEQ ID NO: 2015 - DNA, 639 bp, Artificial Sequence
  synthetic construct; nucleotides encoding sulfonylurea responsive repressor
atggccagactcgacaagagcaaggtgatcaacagcgcactggagctgctgaacgaggtcggaatcgaaggcctcacaacccgtaagctcgcccagaagctcggggttgagcagcctacattgtactggcacgtcaagaacaagcgagctctgctagacgccttggccattgagatgcacgataggcacggcacccactacttgcctttggaaggggaaagctggcaagactacttgaggaacttcgctaagagcatgcgacgtgctttgctcagtcaccgtgatggagccaaggtctcgcttggtacacggtggacggagcaacagtatgaaactgcggagaacatgttggccttcctgacccaacaaggtttctcccttgagaatgccttgtacgcaacctcagctgtgcgtgttttcactctgggtgccgtattgctagatcaagagcagcaagtcgctaaggaggagagggaaacacctactactgatagtatgccgccactgcttcgacaagcctgggaactcaaagaacaccaaggtgcagagccagccttcctgttcggccttgaattgatcatagccggattggagaagcagctgtagagagaaagtgggtctcaccatcaccaccatcac

SEQ ID NO: 2016 - DNA, 639 bp, Artificial Sequence
  synthetic construct; nucleotides encoding sulfonylurea responsive repressor
atggccagactcgacaagagcaaggtgatcaacagcgcactggagctgctgaacgaggtcggaatcgaaggcctcacaacccgtaagctcgcccagaagctcggggttgagcagcctacattgtactggcacgtcaagaacaagcgagctctgctagacgccttggccattgagatgcatgataggcacggaacccactacttgcctttggaaggggaaagctggcaagactttttgaggaactttgctaagagcatgcgacgagctttgctcagtcaccgtgatggagccaaggtcgcccttggtacacggtggacggagcaacagtatgaaactgcggagaacatgttggccttcctgacccaacaaggtttctcccttgagaatgccttgtacgcaacaagcgctgtgcgggttttcactctgggtgccgtattgctggatcaagagggacaagtcgctaatgaggagagggaaacacctactactgatagtatgccgccactgcttcgacaagcctgggaactcaaagttcaccaaggtgcagagccagccttcctgttcggccttgaattgatcatagccggattggagaagcagctgaagagagaaagtgggtctcaccatcaccaccatcac

SEQ ID NO: 2017 - DNA, 639 bp, Artificial Sequence
  synthetic construct; nucleotides encoding sulfonylurea responsive repressor
atggccagactcgacaagagcaaggtgatcaacagcgcactggagctgctgaacgaggtcggaatcgaaggcctcacaacccgtaagctcgcccagaagctcggggttgagcagcctacattgtactggcacgtcaagaacaagcgagctctgctagacgccttggccattgagatgcatgataggcaccaaacccactacttgcctttggaaggggagagctggcaagactttttgaggaactttgctaagagcatgcgacgcgctttgctcagtcaccgtgatggagccaaggtctcccttggtacacggtggacggagcaacagtatgaaactgcggagaacatgttggccttcctgacccaacaaggtttctcccttgagaatgccttgtacgcaacagatgctgtgcgggttttcactctgggtgccgtattgctggatcaagagcaacaagtagctaaggaggagagggaaacacctactactgatagtatgccgccactgcttcgacaagcctgggaactcaaagtgcaccaaggtgcagagccagccttcctgttcggccttgaattgatcatagccggattggagaagcagctgaagagagaaagtgggtctcaccatcaccaccatcac

SEQ ID NO: 2018 - DNA, 639 bp, Artificial Sequence
  synthetic construct; nucleotides encoding sulfonylurea responsive repressor
atggccagactcgacaagagcaaggtgatcaacagcgcactggagctgctgaacgaggtcggaatcgaaggcctcacaacccgtaagctcgcccagaagctcggggttgagcagcctacattgtactggcacgtcaagaacaagcgagctctgctagacgccttggccattgagatgatggataggcaccaaacccactacttgcctttggaaggggaaagctggcaagactatttgaggaactttgctaagagcatgcgatgcgctttgctcagtcaccgtgatggagccaaggtctcccttggtacacggtggacggagcaacagtatgaaactgcggagaacatgttggccttcctgacccaacaaggtttctcccttgagaatgccttgtacgcaacagatgctgtgcgggttttcactctgggtgccgtattgctggatcaagagggacaagtcgctaatgaggagagggaaacacctactcctgatagaatgccgccactgcttcgacaagcctgggaactcaaagtgcaccaaggtgcagagccagccttcctgttcggccttgaattgatcatagccggattggagaagcagctgaagagagaaagtgggtctcaccatcaccaccatcac

SEQ ID NO: 2019 - DNA, 639 bp, Artificial Sequence
  synthetic construct; nucleotides encoding sulfonylurea responsive repressor
atggccagactcgacaagagcaaggtgatcaacagcgcactggagctgctgaacgaggtcggaatcgaaggcctcacaacccgtaagctcgcccagaagctcggggttgagcagcctacattgtactggcacgtcaagaacaagcgagctctgctagacgccttggccattgagatgatggataggcaccaaacccactacttgcctttggaaggggaaagctggcaagactatttgaggaactttgctaagagcatgcgatgcgctttgctcagtcaccgtgatggagccaaggtcgcccttggtacacggtggacggagcaacagtatgaaactgcggagaacatgttggccttcctgacccaacaaggtttctcccttgagaatgccttgtacgcaacaagcgctgtgcgggttttcactctgggtgccgtattgctggatcaagagcaacaagtcgctaaggaggagagggaaacacctactactgatagtatgccgccactgcttcgacaagcctgggaactcaaagttcaccaaggtgcagagccagccttcctgttcggccttgaattgatcatagccggattggagaagcagctgaagagagaaagtgggtctcaccatcaccaccatcac

SEQ ID NO: 2020 - DNA, 639 bp, Artificial Sequence
  synthetic construct; nucleotides encoding sulfonylurea responsive repressor
atggccagactcgacaagagcaaggtgatcaacagcgcactggagctgctgaacgaggtcggaatcgaaggcctcacaacccgtaagctcgcccagaagctcggggttgagcagcctacattgtactggcacgtcaagaacaagcgagctctgctagacgccttggccattgagatgatggataggcaccaaacccactacttgcctttggaaggggaaagctggcaagactttttgaggaactttgctaagagcatgcgatgcgctttgctcagtcaccgtgatggagccaaggtcgcccttggtacacggtggacggagcaacagtatgaaactgcggagaacatgttggccttcctgacccaacaaggtttctcccttgagaatgccttgtacgcaacaagcgctgtgcgggttttcactctgggtgccgtattgctggatcaagagcaacaagtcgctaaggaggagagggaaacacctactcctgataggatgccgccactgcttcgacaagcctgggaactcaaagttcaccaaggtgcagagccagccttcctgttcggccttgaattgctcatagccggattggagaagcagctgaagagagaaagtgggtctcaccatcaccaccatcac

SEQ ID NO: 2021 - DNA, 639 bp, Artificial Sequence
  synthetic construct; nucleotides encoding sulfonylurea responsive repressor
atggccagactcgacaagagcaaggtgatcaacagcgcactggagctgctgaacgaggtcggaatcgaaggcctcacaacccgtaagctcgcccagaagctcggggttgagcagcctacattgtactggcacgtcaagaacaagcgagctctgctagacgccttggccattgagatgcatgataggcaccaaacccactacttgcctttggaaggggaaagctggcaagactttttgaggaactttgctaagagcatgcgactagctttgctcagtcaccgtgatggagccaaggtctcccttggtacacggtggacggagcaacagtatgaaactgcggagaacatgttggccttcctgacccaacaaggtttctcccttgagaatgccttgtacgcaacagatgctgtgcgggttttcactctgggtgccgtattgctggatcaagagcaacaagtcgctaaggaggagagggaaacacctactcctgatagtatgccgccactgcttcgacaagcctgggaactcaaagttcaccaaggtgcagagccagccttcctgttcggccttgaattgatcatagccggattggagaagcagctgaagagagaaagtgggtctcaccatcaccaccatcac

SEQ ID NO: 2022 - DNA, 639 bp, Artificial Sequence
  synthetic construct; nucleotides encoding sulfonylurea responsive repressor
atggccagactcgacaagagcaaggtgatcaacagcgcactggagctgctgaacgaggtcggaatcgaaggcctcacaacccgtaagctcgcccagaagctcggggttgagcagcctacattgtactggcacgtcaagaacaagcgagctctgctagacgccttggccattgagatgatggataggcacggaacccactacttgcctttggaaggggaaagctggcaagactttttgaggaactatgctaagagcatgcgacgagctttgctcagtcaccgtgatggagccaaggtcgcccttggtacacggtggacggagcaacagtatgaaactgcggagaacatgttggcctgcctgacccaacaaggtttctcccttgagaatgccttgtacgcaacaagcgctgtgcgggttttcactctgggtgccgtattgctggatcaagagcaacaagtcgctaacgaggagagggaaacacctactactgatagtatgccgccactgcttcgacaagcctgggaactcaaagtgcaccaaggtgcagagccagccttcctgttcggccttgaattgatcatagccggattggagaagcagctgaagagagaaagtgggtctcaccatcaccaccatcac

SEQ ID NO: 2023 - DNA, 639 bp, Artificial Sequence
  synthetic construct; nucleotides encoding sulfonylurea responsive repressor
atggccagactcgacaagagcaaggtgatcaacagcgcactggagctgctgaacgaggtcggaatcgaaggcctcacaacccgtaagctcgcccagaagctcggggttgagcagcctacattgtactggcacgtcaagaacaagcgagctctgctagacgccttggccattgagatgcatgataggcaccaaacccactacttgcctttggaaggggaaagctggcaagactttttgaggaactttgctaagagcatgcgacgagctttgctcagtcaccgtgatggagccaagatcgcccttggtacacggtggacggagcaacagtatgaaactgcggagaacatgttggccttcctgacccaacaaggtttctcccttgagaatgccttgtacgcaacagatgctgtgcgggttttcactctgggtgccgtattgctggatcaagagcaacaagtcgctaaggaggagagggaaacacctactcctgatagtatgccgccactgcttcgacaagcctgggaactcaaagatcaccaaggtgcagagccagccttcctgttcggccttgaattgatcatagccggattggagaagcagctgaagagagaaagtgggtctcaccatcaccaccatcac

SEQ ID NO: 2024 - DNA, 639 bp, Artificial Sequence
  synthetic construct; nucleotides encoding sulfonylurea responsive repressor
atggccagactcgacaagagcaaggtgatcaacagcgcactggagctgctgaacgaggtcggaatcgaaggcctcacaacccgtaagctcgcccagaagctcggggttgagcagcctacattgtactggcacgtcaagaacaagcgagctctgctagacgccttggccattgagatgatggataggcaccaaacccactacttgcctttggaaggggaaagctggcaagactatttgaggaactttgctaagagcatgcgatgcgctttgctcagtcaccgtgatggagccaaggtcgcccttggtacacggtggacggagcaacagtatgaaactgcggagaacatgttggccttcctgacccaacaaggtttctcccttgagaatgccttgtacgcaacaagcgctgtgcgggttttcactctgggtgccgtattgctggatcaagagcaacaagtcgctaaggaggagagggaaacacctactcctgatagaatgccgccactgcttcgacaagcctgggaactcaaagttcaccaaggtgcagagccagccttcctgttcggccttgaattgatcatagccggattggagaagcagctgaagagagaaagtgggtctcaccatcaccaccatcac

SEQ ID NO: 2025 - DNA, 639 bp, Artificial Sequence
  synthetic construct; nucleotides encoding sulfonylurea responsive repressor
atggccagactcgacaagagcaaggtgatcaacagcgcactggagctgctgaacgaggtcggaatcgaaggcctcacaacccgtaagctcgcccagaagctcggggttgagcagcctacattgtactggcacgtcaagaacaagcgagctctgctagacgccttggccattgagatgcatgataggcaccaaacccactacttgcctttggaaggggaaagctggcaagactatttgaggaactttgctaagagcatgcgatgcgctttgctcagtcaccgtgatggagccaaggtcgcccttggtacacggtggacggagcaacagtatgaaactgcggagaacatgttggccttcctgacccaacaaggtttctcccttgagaatgccttgtacgcaacaagcgctgtacgggttttcactctgggtgccgtattgctggatcaagagggacaagtcgctaatgaggagagggaaacacctactcctgatagtatgccgccactgcttcgacaagcctgggaactcaaagtgcaccaaggtgcagagccagccttcctgttcggccttgaattgatcatagccggattggagaagcagctgaagagagaaagtgggtctcaccatcaccaccatcac

SEQ ID NO: 2026 - DNA, 639 bp, Artificial Sequence
  synthetic construct; nucleotides encoding sulfonylurea responsive repressor
atggccagactcgacaagagcaaggtgatcaacagcgcactggagctgctgaacgaggtcggaatcgaaggcctcacaacccgtaagctcgcccagaagctcggggttgagcagcctacattgtactggcacgtcaagaacaagcgagctctgctagacgccttggccattgagatgcatgataggcaccaaacccactacttgcctttggaaggggaaagctggcaagactatttgaggaactttgctaagagcatgcgatgcgctttgctcagtcaccgtgatggagccaaggtctcccttggtacacggtggacggagcaacagtatgaaactgcggagaacatgttggccttcctgacccaacaaggtttctcccttgagaatgccttgtacgcaacaagcgctgtgcgggttttcactctgggtgccgtattgctggatcaagagcaacaagtcgctaaggaggagagggaaacacctactcctgatagaatgccgccactgcttcgacaagcctgggaactcaaagtgcaccaaggtgcagagccagccttcctgttcggccttgaattgatcatagccggattggagaagcagctgaagagagaaagtgggtctcaccatcaccaccatcac

SEQ ID NO: 2027 - DNA, 639 bp, Artificial Sequence
  synthetic construct; nucleotides encoding sulfonylurea responsive repressor
atggccagactcgacaagagcaaggtgatcaacagcgcactggagctgctgaacgaggtcggaatcgaaggcctcacaacccgtaagctcgcccagaagctcggggttgagcagcctacattgtactggcacgtcaagaacaagcgagctctgctagacgccttggccattgagatgatggataggcaccaaacccactacttgcctttggaaggggaaagctggcaagactttttgaggaactttgctaagagcatgcgatgcgctttgctcagtcaccgtgatggagccaaggtctcccttggtacacggtggacggagcaacagtatgaaactgcggagaacatgttggccttcctgacccaacaaggtttctcccttgagaatgccttgtacgcaacagatgctgtgcgggttttcactctgggtgccgtattgctggatcaagagcaacaagtcgctaaggaggagagggaaacacctactcctgatagaatgccgccactgcttcaacaagcctgggaactcaaagagcaccaaggtgcagagccagccttcctgttcggccttgaattgatcatagccggattggagaagcagctgaagagagatagtgggtctcaccatcaccaccatcac

SEQ ID NO: 2028 - DNA, 639 bp, Artificial Sequence
  synthetic construct; nucleotides encoding sulfonylurea responsive repressor
atggccagactcgacaagagcaaggtgatcaacagcgcactggagctgctgaacgaggtcggaatcgaaggcctcacaacccgtaagctcgcccagaagctcggggttgagcagcctacattgtactggcacgtcaagaacaagcgagctctgctagacgccttggccattgagatgatggataggcaccaaacccactacttgcctttggaaggggaaagctggcaagactatttgaggaactttgctaagagcatgcgatgcgctttgctcagtcaccgtgatggagccaaggtcgcccttggtacacggtggacggagcaacagtatgaaactgcggagaacatgttggccttcctgacccaacaaggtttctcccttgagaatgccttgtacgcaacaagcgctgtgcgggttttcactctgggtgccgtattgctggatcaagagcaacaagtcgctaagcaggagagggaaacacctactcctgatagtatgccgccactgcttcgacaagcctgggaactcaaagtgcaccaaggtgcagagccagccttcctgttcggccttgaattgatcatagccggattggagaagcagctgaagagagaaagtgggtctcaccatcaccaccatcac

SEQ ID NO: 2029 - DNA, 639 bp, Artificial Sequence
  synthetic construct; nucleotides encoding sulfonylurea responsive repressor
atggccagactcgacaagagcaaggtgatcaacagcgcactggagctgctgaacgaggtcggaatcgaaggcctcacaacccgtaagctcgcccagaagctcggggttgagcagcctacattgtactggcacgtcaagaacaagcgagctctgctagacgccttggccattgagatgcatgataggcaccaaacccactacttgcctttggaaggggaaagctggcaagactttttgaggaactttgctaagagcatgcgacgagctttgctcagtcaccgtgatggagccaaggtcgcccttggtacacggtggacggagcaacagtatgaaactgcggagaacatgttggccttcctgacccaacaaggtttctcccttgagaatgccttgtacgcaacaagcgctgtgcgggttttcactctgggtgccgtattgctggatcaagagggacaagttgctaatgaggagagggaaacacctactcctgatagtatgccgccactgcttcgacaagcctgggaactcaaagtgcaccaaggtgcagagccagccttcctgttcggccttgaattgatcatagccggattggagaagcagctgaagagagaaagtgggtctcaccatcaccaccatcac

SEQ ID NO: 2030 - protein, 207 aa, Artificial Sequence
  synthetic construct; Sulfonylurea responsive repressor
MARLDKSKVINSALELLNEVGIEGLTTRKLAQKLGVEQPTLYWHVKNKRALLDALAIEMMDRHQTHYSPLEGESWQDFLRNNAKSCRNALLSHRDGAKVCLGTRWTEQQYESAENMLAFLTQQGFSLENALYALDAVRVFTLGAVLFDQESQVAKEERETPTTDSMPPLLRQAWELKDHQGAEPAFLFGLELIIAGLEKQLKRESGS

SEQ ID NO: 2031 - protein, 207 aa, Artificial Sequence
  synthetic construct; Sulfonylurea responsive repressor
MARLDKSKVINSALELLNEVGIEGLTTRKLAQKLGVEQPTLYWHVKNKRALLDALAIEMMDRHQTHYLPLEGESWQDFLRNNAKSCRNALLSHRDGAKVCLGTRWTEQQYETAENMLAFLTQQGFSLENALYALEAARVFTLGAVLFDQESQVAKEERETPTTDSMPPLLRQAWELKDHQGAEPAFLFGLELIISGLEKQLKRESGS

SEQ ID NO: 2032 - protein, 207 aa, Artificial Sequence
  synthetic construct; Sulfonylurea responsive repressor
MARLDKSKVINSALELLNEVGIEGLTTRKLAQKLGVEQPTLYWHVKNKRALLDALAIEMMDRHQTHYSPLEGESWQDFLRNNAKSCRRALLSHRDGAKVCLGTRWTEQQYESAENMLAFLTQQGFSLENALYAVDAVRVFTLGAVLFDQESQVAKEERETPTTDSMPPLLRQAWELKDHQGAEPAFLFGLELIIAGLEKQLKAESGS

SEQ ID NO: 2033 - protein, 207 aa, Artificial Sequence
  synthetic construct; Sulfonylurea responsive repressor
MARLDKSKVINSALELLNEVGIEGLTTRKLAQKLGVEQPTLYWHVKNKRALLDALAIEMMDRHQTHYSPLEGESWQDFLRNNAKSCRRAVLSHRDGAKVCLGTRWTEQQYESAENMLAFLTQQGFSLENALYAVSAVRVFTLGAVLFDQESQVAKEERETPTTDSMPPLLRQAWELKDHQGAEPAFLFGLELIIAGLEKQLKRESGS

SEQ ID NO: 2034 - protein, 207 aa, Artificial Sequence
  synthetic construct; Sulfonylurea responsive repressor
MARLDKSKVINSALELLNEVGIEGLTTRKLAQKLGVEQPTLYWHVKNKRALLDALAIEMMDRHQTHYSPLEGESWQDFLRNNAKSWRCALLSHRDGAKVCLGTRWTEQQYESAENMLAFLTQQGFSLENALYALEAVRVFTLGWVLFDQESQVAKEERETPTTDSMPPLLRQAWELKDHQGAEPAFLFGLELIIAGLEKQLKAESGS

SEQ ID NO: 2035 - protein, 207 aa, Artificial Sequence
  synthetic construct; Sulfonylurea responsive repressor
MARLDKSKVINSALELLNEVGIEGLTTRKLAQKLGVEQPTLYWHVKNKRALLDALAIEMMDRHQTHYLPLEGESWQDFLRNNAKSCRRALLSHRDGAKVCLGTRWTEQQYESAENMLAFLTQQGFSLENALYAVSAVRVFTLGCVLWDQESQVAKEERETPTTDSMPPLLRQAWELKDHQGAEPAFLFGLELIIRGLEKQLKAESGS

SEQ ID NO: 2036 - protein, 207 aa, Artificial Sequence
  synthetic construct; Sulfonylurea responsive repressor
  MISC_FEATURE (144)..(144): Xaa = Any Amino Acid
  MISC_FEATURE (203)..(203): Xaa = Any Amino Acid
MARLDKSKVINSALELLNEVGIEGLTTRKLAQKLGVEQPTLYWHVKNKRALLDALAIEMMDRHQTHYLPLEGESWQDFLRNLAKSMRCALLSHRDGAKVCLGTRWTEQQYESAENMLAFLTQQGFSLENALYAVSAVRVFTLGXVLFDQESQVAKEERETPTTDSMPPLLRQAWELKDHQGAEPAFLFGLELIISGLEKQLKXESGS

SEQ ID NO: 2037 - protein, 207 aa, Artificial Sequence
  synthetic construct; Sulfonylurea responsive repressor
MARLDKSKVINSALELLNEVGIEGLTTRKLAQKLGVEQPTLYWHVKNKRALLDALAIEMMDRHQTHYLPLEGESWQDFLRNNAKSCRRALLSHRDGAKVCLGTRWTEQQYESAENMLAFLCQQGFSLENALYAVSAVRVFTLGAVLFDQESQVAKEERETPTTDSMPPLLRQAWELKDHQGAEPAFLFGLELIIRGLEKQLKAESGS

SEQ ID NO: 2038 - protein, 207 aa, Artificial Sequence
  synthetic construct; Sulfonylurea responsive repressor
MARLDKSKVINSALELLNEVGIEGLTTRKLAQKLGVEQPTLYWHVKNKRALLDALAIEMMDRHQTHYSPLEGESWQDFLRNNAKSCRRALLSHRDGAKVCLGTRWTEQQYESAENMLAFLTQQGFSLENALYALTAARVFTLGWVLFDQESQVAKEERETPTTDSMPPLLRQAWELKDHQGAEPAFLFGLELIISGLEKQLKSESGS

SEQ ID NO: 2039 - protein, 207 aa, Artificial Sequence
  synthetic construct; Sulfonylurea responsive repressor
MARLDKSKVINSALELLNEVGIEGLTTRKLAQKLGVEQPTLYWHVKNKRALLDALAIEMMDRHQTHYSPLEGESWQDFLRNNAKSCRNALLSHRDGAKVCLGTRWTEQQYESAENMLAFLTQQGFSLENALYAVSAVRVFTLGAVLYDQESQVAKEERETPTTDSMPPLLRQAWELKDHQGAEPAFLFGLELIIRGLEKQLKAESGS

SEQ ID NO: 2040 - protein, 207 aa, Artificial Sequence
  synthetic construct; Sulfonylurea responsive repressor
MARLDKSKVINSALELLNEVGIEGLTTRKLAQKLGVEQPTLYWHVKNKRALLDALAIEMMDRHQTHYLPLEGESWQDFLRNNAKSCRNALLSHRDGAKVCLGTRWTEQQYESAENMLAFLTQQGFSLENALYAVSAVRVFTLGAVLYDQESQVAKEERETPTTDSMPPLLRQAWELKDHQGAEPAFLFGLELIIRGLEKQLKAESGS

SEQ ID NO: 2041 - protein, 207 aa, Artificial Sequence
  synthetic construct; Sulfonylurea responsive repressor
MARLDKSKVINSALELLNEVGIEGLTTRKLAQKLGVEQPTLYWHVKNKRALLDALAIEMMDRHQTHYLPLEGESWQDFLRNNAKSCRRALLSHRDGAKVCLGTRWTEQQYETAENMLAFLTQQGFSLENALYAVSAVRVFTLGAVLFDQESQVAKEERETPTTDSMPPLLRQAWELKDHQGAEPAFLFGLELIIRGLEKQLKRESGS

SEQ ID NO: 2042 - protein, 207 aa, Artificial Sequence
  synthetic construct; Sulfonylurea responsive repressor
MARLDKSKVINSALELLNEVGIEGLTTRKLAQKLGVEQPTLYWHVKNKRALLDALAIEMMDRHQTHYSPLEGESWQDFLRNNAKSCRNALLSHRDGAKVCLGTRWTEQQYESAENMLAFLTQQGFSLENALYALQAVRVFTLGAVLFDQESQVAKEERETPTTDSMPPLLRQAWELKDHQGAEPAFLFGLELIIAGLEKQLKRESGS

SEQ ID NO: 2043 - protein, 207 aa, Artificial Sequence
  synthetic construct; Sulfonylurea responsive repressor
MARLDKSKVINSALELLNEVGIEGLTTRKLAQKLGVEQPTLYWHVKNKRALLDALAIEMMDRHQTHYLPLEGESWQDFLRNNAKSCRRALLSHRDGAKVCLGTRWTEQQYETAENMLAFLTQQGFSLENALYAVSAVRVFTLGAVLFDQESQVAKEERETPTTDSMPPLLRQAWELKDHQGAEPAFLFGLELIIAGLEKQLKAESGS

SEQ ID NO: 2044 - protein, 207 aa, Artificial Sequence
  synthetic construct; Sulfonylurea responsive repressor
MARLDKSKVINSALELLNEVGIEGLTTRKLAQKLGVEQPTLYWHVKNKRALLDALAIEMMDRHQTHYLPLEGESWQDFLRNNAKSCRRALLSHRDGAKVCLGTRWTEQQYESAENMLAFLCQQGFSLENALYAVSAVRVFTLGAVLFDQESQVAKEERETPTTDSMPPLLRQAWELKDHQGAEPAFLFGLELIIAGLEKQLKRESGS

SEQ ID NO: 2045 - protein, 207 aa, Artificial Sequence
  synthetic construct; Sulfonylurea responsive repressor
MARLDKSKVINSALELLNEVGIEGLTTRKLAQKLGVEQPTLYWHVKNKRALLDALAIEMMDRHQTHYSPLEGESWQDFLRNNAKSCRNALLSHRDGAKVCLGTRWTEQQYESAENMLAFLTQQGFSLENALYALQAVRVFTLGWVLFDQESQVAKEERETPTTDSMPPLLRQAWELKDHQGAEPAFLFGLELIIRGLEKQLKSESGS

SEQ ID NO: 2046 - protein, 207 aa, Artificial Sequence
  synthetic construct; Sulfonylurea responsive repressor
MARLDKSKVINSALELLNEVGIEGLTTRKLAQKLGVEQPTLYWHVKNKRALLDALAIEMMDRHQTHYSPLEGESWQDFLRNNAKSCRRALLSHRDGAKVCLGTRWTEQQYESAENMLAFLTQQGFSLENALYALEAVRVFTLGAVLFDQESQVAKEERETPTTDSMPPLLRQAWELKDHQGAEPAFLFGLELIIRGLEKQLKRESGS

SEQ ID NO: 2047 - protein, 207 aa, Artificial Sequence
  synthetic construct; Sulfonylurea responsive repressor
MARLDKSKVINSALELLNEVGIEGLTTRKLAQKLGVEQPTLYWHVKNKRALLDALAIEMMDRHQTHYSPLEGESWQDFLRNNAKSCRRALLSHRDGAKVCLGTRWTEQQYESAENMLAFLTQQGFSLENALYAVSAVRVFTLGAVLFDQESQVAKEERETPTTDSMPPLLRQAWELKDHQGAEPAFLFGLELIIRGLEKQLKRECGS

SEQ ID NO: 2048 - protein, 207 aa, Artificial Sequence
  synthetic construct; Sulfonylurea responsive repressor
MARLDKSKVINSALELLNEVGIEGLTTRKLAQKLGVEQPTLYWHVKNKRALLDALAIEMMDRHQTHYSPLEGESWQDFLRNNAKSCRNALLSHRDGAKVCLGTRWTEQQYESAENMLAFLTQQGFSLENALYAVSAVRVFTLGAVLFDQESQVAKEERETPTTDSMPPLLRQAWELKDHQGAEPAFLFGLELIISGLEKQLKSESGS

SEQ ID NO: 2049 - protein, 207 aa, Artificial Sequence
  synthetic construct; Sulfonylurea responsive repressor
MARLDKSKVINSALELLNEVGIEGLTTRKLAQKLGVEQPTLYWHVKNKRALLDALAIEMMDRHQTHYLPLEGESWQDFLRNNAKSCRNALLSHRDGAKVCLGTRWTEQQYESAENMLAFLTQQGFSLENALYAVSAVRVFTLGAVLFDQESQVAKEERETPTTDSMPPLLRQAWELKDHQGAEPAFLFGLELIISGLEKQLKRESGS

SEQ ID NO: 2050 - protein, 207 aa, Artificial Sequence
  synthetic construct; Sulfonylurea responsive repressor
MARLDKSKVINSALELLNEVGIEGLTTRKLAQKLGVEQPTLYWHVKNKRALLDALAIEMMDRHQTHYSPLEGESWQDFLRNNAKSMRCALLSHRDGAKVCLGTRWTEQQYESAENMLAFLTQQGFSLENALYAVSAVRVFTLGWVLFDQESQVAKEERETPTTDSMPPLLRQAWELKDHQGAEPAFLFGLELIIAGLEKQLKRESGS

SEQ ID NO: 2051 - protein, 207 aa, Artificial Sequence
  synthetic construct; Sulfonylurea responsive repressor
MARLDKSKVINSALELLNEVGIEGLTTRKLAQKLGVEQPTLYWHVKNKRALLDALAIEMMDRHQTHYLPLEGESWQDFLRNNAKSCRRALLSHRDGAKVCLGTRWTEQQYESAENMLAFLTQQGFSLENALYAVSAVRVFTLGAVLFDQESQVAKEERETPTTDSMPPLLRQAWELKDHQGAEPAFLFGLELIISGLEKQLKRESGS

SEQ ID NO: 2052 - protein, 207 aa, Artificial Sequence
  synthetic construct; Sulfonylurea responsive repressor
MARLDKSKVINSALELLNEVGIEGLTTRKLAQKLGVEQPTLYWHVKNKRALLDALAIEMMDRHQTHYLPLEGESWQDFLRNNAKSCRRALLSHRDGAKVCLGTRWTEQQYESAENMLAFLTQQGFSLENALYAVSAVRVFTLGWVLFDQESQVAKEERETPTTDSMPPLLRQAWELKDHQGAEPAFLFGLELIISGLEKQLKRESGS

SEQ ID NO: 2053 - protein, 207 aa, Artificial Sequence
  synthetic construct; Sulfonylurea responsive repressor
MARLDKSKVINSALELLNEVGIEGLTTRKLAQKLGVEQPTLYWHVKNKRALLDALAIEMLDRHQTHYSPLEGESWQDFLRNNAKSCRRALLSHRDGAKVCLGTRWTEQQYESAENMLAFLTQQGFSLENALYAVSAVRVFTLGAVLFDQESQVAKEERETPTTDSMPPLLRQAWELKDHQGAEPAFLFGLELIIAGLEKQLKSESGS

SEQ ID NO: 2054 - protein, 207 aa, Artificial Sequence
  synthetic construct; Sulfonylurea responsive repressor
MARLDKSKVINSALELLNEVGIEGLTTRKLAQKLGVEQPTLYWHVKNKRALLDALAIEMMDRHQTHYLPLEGESWQDFLRNNAKSCRRALLSHRDGAKVCLGTRWTEQQYESAENMLAFLTQQGFSLENALYAVSAVRVFTLGAVLFDQESQVAKEERETPTTDSMPPLLRQAWELKDHQGAEPAFLFGLELIIRGLEKQLKSESGS

SEQ ID NO: 2055 - protein, 207 aa, Artificial Sequence
  synthetic construct; Sulfonylurea responsive repressor
MARLDKSKVINSALELLNEVGIEGLTTRKLAQKLGVEQPTLYWHVKNKRALLDALAIEMMDRHQTHYSPLEGESWQDFLRNNAKSCRNALLSHRDGAKVCLGTRWTEQQYESAENMLAFLTQQGFSLENAMYALQAVRVFTLGWVLFDQESQVAKEERETPTTDSMPPLLRQAWELKDHQGAEPAFLFGLELIIAGLEKQLKRESGS

SEQ ID NO: 2056 - protein, 207 aa, Artificial Sequence
  synthetic construct; Sulfonylurea responsive repressor
MARLDKSKVINSALELLNEVGIEGLTTRKLAQKLGVEQPTLYWHVKNKRALLDALAIEMMDRHQTHYSPLEGESWQDFLRNNAKSLRCALLSHRDGAKVCLGTRWTEQQYESAENMLAFLTQQGFSLENALYAVDAARVFTLGWVLFDQESQVAKEERETPTTDSMPPLLRQAWELKDHQGAEPAFLFGLELIIRGLEKQLKRESGS

SEQ ID NO: 2057 - protein, 207 aa, Artificial Sequence
  synthetic construct; Sulfonylurea responsive repressor
MARLDKSKVINSALELLNEVGIEGLTTRKLAQKLGVEQPTLYWHVKNKRALLDALAIEMMDRHQTHYSPLEGESWQDFLRNNAKSCRRALLSHRDGAKVCLGTRWTEQQYETAENMLAFLTQQGFSLENALYAVSAVRVFTLGAVLFDQESQVAKEERETPTTDSMPPLLRQAWELKDHQGAEPAFLFGLELIISGLEKQLKSESGS

SEQ ID NO: 2058 - protein, 207 aa, Artificial Sequence
  synthetic construct; Sulfonylurea responsive repressor
MARLDKSKVINSALELLNEVGIEGLTTRKLAQKLGVEQPTLYWHVKNKRALLDALAIEMMDRHQTHYLPLEGESWQDFLRNNAKSCRNALLSHRDGAKVCLGTRWTEQQYESAENMLAFLTQQGFSLENALYALDAVRVFTLGAVLFDQESQVAKEERETPTTDSMPPLLRQAWELKDHQGAEPAFLFGLELIIRGLEKQLKSESGS

SEQ ID NO: 2059 - protein, 207 aa, Artificial Sequence
  synthetic construct; Sulfonylurea responsive repressor
MARLDKSKVINSALELLNEVGIEGLTTRKLAQKLGVEQPTLYWHVKNKRALLDALAIEMLDRHQTHYSPLEGESWQDFLRNNAKSCRRALLSHRDGAKVCLGTRWTEQQYESAENMLAFLCQQGFSLENALYAVSAVRVFTLGAVLFDQESQVAKEERETPTTDSMPPLLRQAWELKDHQGAEPAFLFGLELIIRGLEKQLKAESGS

SEQ ID NO: 2060 - protein, 207 aa, Artificial Sequence
  synthetic construct; Sulfonylurea responsive repressor
MARLDKSKVINSALELLNEVGIEGLTTRKLAQKLGVEQPTLYWHVKNKRALLDALAIEMMDRHQTHYSPLEGESWQDFLRNNAKSFRCALLSHRDGAKVCLGTRWTEQQYESAENMLAFLTQQGFSLENALYALKAVRIFTLGAVLFDQESQVAKEERETPTTDSMPPLLRQAWELKDHQGAEPAFLFGLELIIAGLEKQLKAESGS

SEQ ID NO: 2061 - protein, 207 aa, Artificial Sequence
  synthetic construct; Sulfonylurea responsive repressor
MARLDKSKVINSALELLNEVGIEGLTTRKLAQKLGVEQPTLYWHVKNKRALLDALAIEMMDRHQTHYCPLEGESWQDFLRNNAKSLRCALLSHRDGAKVCLGTRWTEQQYESAENMLAFLTQQGFSLENALYALQAVRIFTLGCVLFDQESQVAKEERETPTTDSMPPLLRQAWELKDHQGAEPAFLFGLELIIRGLEKQLKRESGS

SEQ ID NO: 2062 - protein, 207 aa, Artificial Sequence
  synthetic construct; Sulfonylurea responsive repressor
MARLDKSKVINSALELLNEVGIEGLTTRKLAQKLGVEQPTLYWHVKNKRALLDALAIEMMDRHQTHYLPLEGESWQDFLRNNAKSLRCALLSHRDGAKVCLGTRWTEQQYESAENMLAFLTQQGFSLENALYALSAVRVFTLGWVLFDQESQVAKEERETPTTDSMPPLLRQAWELKDHQGAEPAFLFGLELIIAGLEKQLKRESGS

SEQ ID NO: 2063 - protein, 207 aa, Artificial Sequence
  synthetic construct; Sulfonylurea responsive repressor
MARLDKSKVINSALELLNEVGIEGLTTRKLAQKLGVEQPTLYWHVKNKRALLDALAIEMMDRHQTHYLPLEGESWQDFLRNNAKSCRRALLSHRDGAKVCLGTRWTEQQYETAENMLAFLTQQGFSLENALYAVSAVRVFTLGAVLFDQESQVAKEERETPTTDSMPPLLRQAWELKDHQGAEPAFLFGLELIIAGLEKQLKRESGS

SEQ ID NO: 2064 - protein, 207 aa, Artificial Sequence
  synthetic construct; Sulfonylurea responsive repressor
MARLDKSKVINSALELLNEVGIEGLTTRKLAQKLGVEQPTLYWHVKNKRALLDALAIEMMDRHQTHYSPLEGESWQDFLRNNAKSCRRALLSHRDGAKVCLGTRWTEQQYESAENMLAFLCQQGFSLENALYAVSAVRIFTLGAVLFDQESQVAKEERETPTTDSMPPLLRQAWELKDHQGAEPAFLFGLELIIAGLEKQLKRESGS

SEQ ID NO: 2065 - protein, 207 aa, Artificial Sequence
  synthetic construct; Sulfonylurea responsive repressor
MARLDKSKVINSALELLNEVGIEGLTTRKLAQKLGVEQPTLYWHVKNKRALLDALAIEMMDRHQTHYCPLEGESWQDFLRNNAKSCRNALLSHRDGAKVCLGTRWTEQQYESAENMLAFLTQQGFSLENAMYALKAVRIFTLGCVLWDQESQVAKEERETPTTDSMPPLLRQAWELKDHQGAEPAFLFGLELIIRGLEKQLKRESGS

SEQ ID NO: 2066 - protein, 207 aa, Artificial Sequence
  synthetic construct; Sulfonylurea responsive repressor
MARLDKSKVINSALELLNEVGIEGLTTRKLAQKLGVEQPTLYWHVKNKRALLDALAIEMMDRHQTHYSPLEGESWQDFLRNNAKSCRNALLSHRDGAKVVLGTRWTEQQYESAENMLAFLTQQGFSLENAMYALEAARIFTLGWVLFDQESQVAKEERETPTTDSMPPLLRQAWELKDHQGAEPAFLFGLELIIRGLEKQLKSESGS

SEQ ID NO: 2067 - protein, 207 aa, Artificial Sequence
  synthetic construct; Sulfonylurea responsive repressor
MARLDKSKVINSALELLNEVGIEGLTTRKLAQKLGVEQPTLYWHVKNKRALLDALAIEMMDRHQTHYSPLEGESWQDFLRNNAKSLRCALLSHRDGAKVCLGTRWTEQQYESAENMLAFLTQQGFSLENALYALTAVRVFTLGWVLFDQESQVAKEERETPTTDSMPPLLRQAWELKDHQGAEPAFLFGLELIIAGLEKQLKRESGS

SEQ ID NO: 2068 - protein, 213 aa, Artificial Sequence
  synthetic construct; Sulfonylurea responsive repressor
MARLDKSKVINSALELLNEVGIEGLTTRKLAQKLGVEQPTLYWHVKNKRALLDALAIEMMDRHQTHYLPLEGESWQDFLRNFAKSMRRALLSHRDGAKVSLGTRWTEQQYETAENMLAFLTQQGFPLENALYATDAVRVFTLGAVLQDQEGQVAKEERETPTTDSMPPLLRQAWELKDHQGAEPAFLFGLELIIAGLEKQLKRESGSHHHHHH

SEQ ID NO: 2069 - protein, 213 aa, Artificial Sequence
  synthetic construct; Sulfonylurea responsive repressor
MARLDKSKVINSALELLNEVGIEGLTTRKLAQKLGVEQPTLYWHVKNKRALLDALAIEMHDRHQTHYLPLEGESWQDFLRNFAKSMRRALLSHRDGAKVSLGTRWTEQQYETAENMLAFLTQQGFSLENALYATSAVRVFTLGAVLQDQEQQVAKEERETPTPDSMPPLLRQAWELKDHQGAEPAFLFGLELIIAGLEKQLKRESGSHHHHHH

SEQ ID NO: 2070 - protein, 213 aa, Artificial Sequence
  synthetic construct; Sulfonylurea responsive repressor
MARLDKSKVINSALELLNEVGIEGLTTRKLAQKLGVEQPTLYWHVKNKRALLDALAIEMMDRHQTHYLPLEGESWQDFLRNYAKSMRRALLSHRDGAKVALGTRWTEQQYETAENMLAFLTQQGFSLENALYATSAVRVFTLGAVLQDQEGQVAKEERETPTTDSMPPLLRQAWELKDHQGAEPAFLFGLELIIAGLEKQLKRESGSHHHHHH

SEQ ID NO: 2071 - protein, 213 aa, Artificial Sequence
  synthetic construct; Sulfonylurea responsive repressor
MARLDKSKVINSALELLNEVGIEGLTTRKLAQKLGVEQPTLYWHVKNKRALLDALAIEMMDRHQTHYLPLEGESWQDFLRNFAKSMRRALLSHRDGAKVALGTRWTEQQYETAENMLAFLTQQGFSLENALYATSAVRVFTLGAVLLDQEQQVAKEERETPTTDSMPPLLRQAWELKDHQGAEPAFLFGLELIIAGLEKQLKRESGSHHHHHH

SEQ ID NO: 2072 - protein, 213 aa, Artificial Sequence
  synthetic construct; Sulfonylurea responsive repressor
MARLDKSKVINSALELLNEVGIEGLTTRKLAQKLGVEQPTLYWHVKNKRALLDALAIEMMDRHGTHYLPLEGESWQDFLRNYAKSMRRALLSHRDGAKVALGTRWTEQQYETAENMLAFLTQQGFSLENALYATGAVRIFTLGAVLQDQESQVAKEERETPTTDSMPPLLRQAWELKDHQGAEPAFLFGLEVIIAGLEKQLKRESGSHHHHHH

SEQ ID NO: 2073 - protein, 201 aa, Artificial Sequence
  synthetic construct; Sulfonylurea responsive repressor
MARLDKSKVINSALELLNEVGIEGLTTRKLAQKLGVEQPTLYWHVKNKRALLDALAIEMHDRHGTHYLPLEGESWQDFLRNFAKSMRRALLSHRDGAKVSLGTRWTEQQYETAENMLAFLTQQGFSLENALYATSAVRVFTLGAVLLDQEQQVAKEERETPTTDSMPPLLRQAWELKDHQGAEPAFLFGLELIIAGLEKQL

SEQ ID NO: 2074 - protein, 213 aa, Artificial Sequence
  synthetic construct; Sulfonylurea responsive repressor
MARLDKSKVINSALELLNEVGIEGLTTRKLAQKLGVEQPTLYWHVKNKRALLDALAIEMMDRHGTHYLPLEGESWQDFLRNFAKSMRRALLSHRDGAKVSLGTRWTEQQYETAENMLAFLTQQGFSLENALYATSAVRVFTLGAVLQDQESQVAKEERETPTTDSMPPLLRQAWELKDHQGAEPAFLFGLELIIAGLEKQLKRESGSHHHHHH

SEQ ID NO: 2075 - protein, 213 aa, Artificial Sequence
  synthetic construct; Sulfonylurea responsive repressor
MARLDKSKVINSALELLNEVGIEGLTTRKLAQKLGVEQPTLYWHVKNKRALLDALAIEMHDRHQTHYLPLEGESWQDFLRNFAKSMRRALLSHRDGAKVSLGTRWTEQQYETGENMLAFLTQQGFSLENALYAVDAVRVFTLGAVLQDQEGQVAKEDRETPTTDSMPPLLRQAWELKDHQGAEPAFLFGLELIIAGLEKQLKRESGSHHHHHH

SEQ ID NO: 2076 - protein, 213 aa, Artificial Sequence
  synthetic construct; Sulfonylurea responsive repressor
MARLDKSKVINSALELLNEVGIEGLTTRKLAQKLGVEQPTLYWHVKNKRALLDALAIEMMDRHQTHYLPLEGESWQDFLRNYAKSMRRALLSHRDGAKVSLGTRWTEQQYETAENMLAFLTQQGFSLENALYATSAVRVFTLGAVLQDQEGQVANEERETPTTDSMPPLLRQAWELKDHQGAEPAFLFGLELIIAGLEKQLKRESGSHHHHHH

SEQ ID NO: 2077 - protein, 213 aa, Artificial Sequence
  synthetic construct; Sulfonylurea responsive repressor
MARLDKSKVINSALELLNEVGIEGLTTRKLAQKLGVEQPTLYWHVKNKRALLDALAIEMMDRHQTHYLPLEGESWQDFLRNFAKSMRRALLSHRDGAKVSLGTRWTEQQYETAENMLAFLTQQGFSLENALYATSAVRVFTLGAVLQDQESQVAKEERETPTTDSMPPLLRQAWELKDHQGAEPAFLFGLELIIAGLEKQLNRESGSHHHHHH

SEQ ID NO: 2078 - protein, 213 aa, Artificial Sequence; identical to SEQ ID NO: 2068
  synthetic construct; Sulfonylurea responsive repressor

SEQ ID NO: 2079 - protein, 213 aa, Artificial Sequence
  synthetic construct; Sulfonylurea responsive repressor
MARLDKSKVINSALELLNEVGIEGLTTRKLAQKLGVEQPTLYWHVKNKRALLDALAIEMHDRHQTHYLPLEGESWQDFLRNFAKSMRRALLSHRDGAKVSLGTRWTEQQYETAENMLAFLTQQGFSLENALYATSAVRVFTLGAVLQDQESQVAKEERETPTTDSMPPLLRQAWELKDHQGAEPAFLFGLELIIAGLEKQLKRESGSHHHHHH

SEQ ID NO: 2080 - protein, 213 aa, Artificial Sequence
  synthetic construct; Sulfonylurea responsive repressor
MARLDKSKVINSALELLNEVGIEGLTTRKLAQKLGVEQPTLYWHVKNKRALLDALAIEMNDRHQTHYLPLEGESWQDFLRNFAKSMRRALLSHRDGAKVSLGTRWTEQQYETAENMLAFLTQQGFSLENALYATSAVRVFTLGAVLQDQESQVAKEERETPTTDSMPPLLRQAWELKDHQGAEPAFLFGLELIIAGLEKQLKRESGSHHHHHH

SEQ ID NO: 2081 - protein, 213 aa, Artificial Sequence
  synthetic construct; Sulfonylurea responsive repressor
MARLDKSKVINSALELLNEVGIEGLTTRKLAQKLGVEQPTLYWHVKNKRALLDALAIEMMDRHSTHYLPLEGESWQDFLRNFAKSMRRALLSHRDGAKVALGTRWTEQQYETGENMLAFLTQQGFSLENALYATSAVRVFTLGAVLQDQESQVAKEERETPTTDSMPPLLRQAWELKDHQGAEPAFLFGLELIIAGLEKQLKRESGSHHHHHH

SEQ ID NO: 2082 - protein, 213 aa, Artificial Sequence; identical to SEQ ID NO: 2070
  synthetic construct; Sulfonylurea responsive repressor

SEQ ID NO: 2083 - protein, 213 aa, Artificial Sequence
  synthetic construct; Sulfonylurea responsive repressor
MARLDKSKVINSALELLNEVGIEGLTTRKLAQKLGVEQPTLYWHVKNKRALLDALAIEMMDRHQTHYLPLEGESWQDFLRNFAKSMRRALLSHRDGAKVALGTRWTEQQYETAENMLAFLTQQGFSLENALYATSAVRVFTLGAVLQDQEGQVAKEERETPTTDSMPPLLRQAWELKDHQGAEPAFLFGLELIIAGLEKQLKRESGSHHHHHH

SEQ ID NO: 2084 - protein, 213 aa, Artificial Sequence
  synthetic construct; Sulfonylurea responsive repressor
MARLDKSKVINSALELLNEVGIEGLTTRKLAQKLGVEQPTLYWHVKNKRALLDALAIEMHDRHQTHYLPLEGESWQDFLRNFAKSMRRALLSHRDGAKVALGTRWTEQQYETGENMLAFLTQQGFSLENALYATSAVRVFTLGAVLQDQEGQVAKEERETPTTDSMPPLLRQAWELKDHQGAEPAFLFGLELIIAGLEKQLKRESGSHHHHHH

SEQ ID NO: 2085 - protein, 213 aa, Artificial Sequence
  synthetic construct; Sulfonylurea responsive repressor
MARLDKSKVINSALELLNEVGIEGLTTRKLAQKLGVEQPTLYWHVKNKRALLDALAIEMHDRHRTHYLPLEGESWQDFLRNYAKSMRRALLSHRDGAKVSLGTRWTEQQYETAENMLAFLTQQGFSLENALYATSAVRVFTLGAVLVDQEQQVAKEETETPTTDSMPPLLRQAWELKDHQGAEPAFLFGLELIIAGLEKQLKRESGSHHHHHH

SEQ ID NO: 2086 - protein, 213 aa, Artificial Sequence
  synthetic construct; Sulfonylurea responsive repressor
MARLDKSKVINSALELLNEVGIEGLTTRKLAQKLGVEQPTLYWHVKNKRALLDALAIEMMDRHQTHYLPLEGESWQDFLRNFAKSMRRALLSHRDGAKVSLGTRWTEQQYETAENMLAFLIQQGFSLQNALYALSAVRVFTLGAVLQDQESQVAKEERETPTTDSMPPLLRQAWELKDHQGAEPAFLFGLELIIAGLEKQLKRESGSHHHHHH

SEQ ID NO: 2087 - protein, 213 aa, Artificial Sequence
  synthetic construct; Sulfonylurea responsive repressor
MARLDKSKVINSALELLNEVGIEGLTTRKLAQKLGVEQPTLYWHVKNKRALLDALAIEMMDRHQTHYLPLEGESWQDFLRNYAKSMRRALLSHRDGAKVALGTRWTEQQYETAENMLAFLTQQGFSLENALYATGAVRVFTLGAVLQDQESHVAKVERETPTTDSMPPLLRQAWELKDHQGAEPAFLFGLELIIAGLEKQLKRESGSHHHHHH

SEQ ID NO: 2088 - protein, 201 aa, Artificial Sequence
  synthetic construct; Sulfonylurea responsive repressor
MARLDKSKVINSALELLNEVGIEGLTTRKLAQKLGVEQPTLYWHVKNKRALLDALAIEMHDRHGTHYLPLEGESWQDFLRNFAKSMRRALLSHRDGAKVSLGTRWTEQQYETAENMLAFLTQQGFSLENALYATSAVRVFTLGAVLLDQEQQVAKEERETPTTDSMPPLLRQAWELKVHQGAEPAFLFGLELIIAGLEKQL

SEQ ID NO: 2089 - protein, 201 aa, Artificial Sequence
  synthetic construct; Sulfonylurea responsive repressor
MARLDKSKVINSALELLNEVGIEGLTTRKLAQKLGVEQPTLYWHVKNKRALLDALAIEMHDRHGTHYLPLEGESWQDFLRNFAKSMRCALLSHRDGAKVSLGTRWTEQQYETAENMLAFLTQQGFSLENALYATSAVRVFTLGAVLLDQEQQVAKEERETPTTDRMPPLLRQAWELKDHQGAEPAFLFGLELIIAGLEKQL

SEQ ID NO: 2090 - protein, 201 aa, Artificial Sequence
  synthetic construct; Sulfonylurea responsive repressor
MARLDKSKVINSALELLNEVGIEGLTTRKLAQKLGVEQPTLYWHVKNKRALLDALAIEMHDRHGTHYLPLEGESWQDYLRNFAKSMRRALLSHRDGAKVSLGTRWTEQQYETAENMLAFLTQQGFSLENALYATSAVRVFTLGAVLLDQEQQVAKEERETPTTDSMPPLLRQAWELKEHQGAEPAFLFGLELIIAGLEKQL

SEQ ID NO: 2091 - protein, 201 aa, Artificial Sequence
  synthetic construct; Sulfonylurea responsive repressor
MARLDKSKVINSALELLNEVGIEGLTTRKLAQKLGVEQPTLYWHVKNKRALLDALAIEMHDRHGTHYLPLEGESWQDFLRNFAKSMRRALLSHRDGAKVSLGTRWTEQQYETAENMLAFLTQQGFSLENALYATSAVRVFTLGAVLLDQEQQVAKEERETPTTDSMPPLLRQAWELKEHQGAEPAFLFGLELIIAGLEKQL

SEQ ID NO: 2092 - protein, 213 aa, Artificial Sequence
  synthetic construct; Sulfonylurea responsive repressor
MARLDKSKVINSALELLNEVGIEGLTTRKLAQKLGVEQPTLYWHVKNKRALLDALAIEMHDRHQTHYLPLEGESWQDYLRNFAKSMRRALLSHRDGAKVALGTRWTEQQYETAENMLAFLTQQGFSLENALYATDAVRVFTLGAVLLDQEGQVAKEERETPTTDSMPPLLRQAWELKVHQGAEPAFLFGLELIIAGLEKQLKRESGSHHHHHH

SEQ ID NO: 2093 - protein, 213 aa, Artificial Sequence
  synthetic construct; Sulfonylurea responsive repressor
MARLDKSKVINSALELLNEVGIEGLTTRKLAQKLGVEQPTLYWHVKNKRALLDALAIEMHDRHQTHYLPLEGESWQDFLRNFAKSMRCALLSHRDGAKVALGTRWTEQQYETAENMLAFLTQQGFSLENALYATDAVRVFTLGAVLLDQEQQVANEGRETPTTDSMPPLLRQAWELKEHQGAEPAFLFGLELIIAGLEKQLKRESGSHHHHHH

SEQ ID NO: 2094 - protein, 213 aa, Artificial Sequence
  synthetic construct; Sulfonylurea responsive repressor
MARLDKSKVINSALELLNEVGIEGLTTRKLAQKLGVEQPTLYWHVKNKRALLDALAIEMHDRHQTHYLPLEGESWQDYLRNFAKSMRCALLSHRDGAKIALGTRWTEQQYETAENMLAFLTQQGFSLENALYATDAVRVFTLGAVLLDQEQQVAKEERETPTPDSMPPLLRQAWELKVHQGAEPAFLFGLELIIAGLEKQLKRESGSHHHHHH

SEQ ID NO: 2095 - protein, 213 aa, Artificial Sequence
  synthetic construct; Sulfonylurea responsive repressor
MARLDKSKVINSALELLNEVGIEGLTTRKLAQKLGVEQPTLYWHVKNKRALLDALAIEMMDRHQTHYLPLEGESWQDFLRNFAKSMRRALLSHRDGAKVALGTRWTEQQYETAENMLAFLTQHGFSLENALYATDAVRVFTLGAVLLDQEQQVAKEERETPTPDSMPPLLRQAWELKVHQGAEPAFLFGLELIIAGLEKQLKRESGSHHQHHH

SEQ ID NO: 2096 - protein, 213 aa, Artificial Sequence
  synthetic construct; Sulfonylurea responsive repressor
  MISC_FEATURE (202)..(202): Xaa = Any Amino Acid
MARLDKSKVINSALELLNEVGIEGLTTRKLAQKLGVEQPTLYWHVKNKRALLDALAIEMHDRHGTHYLPLEGESWQDYLRNFAKSMRRALLSHRDGAKVSLGTRWTEQQYETAENMLAFLTQQGFSLENALYATSAVRVFTLGAVLLDQEQQVAKEERETPTTDSMPPLLRQAWELKEHQGAEPAFLFGLELIIAGLEKQLXRESGSHHHHHH

SEQ ID NO: 2097 - protein, 213 aa, Artificial Sequence
  synthetic construct; Sulfonylurea responsive repressor
MARLDKSKVINSALELLNEVGIEGLTTRKLAQKLGVEQPTLYWHVKNKRALLDALAIEMHDRHGTHYLPLEGESWQDFLRNFAKSMRRALLSHRDGAKVALGTRWTEQQYETAENMLAFLTQQGFSLENALYATSAVRVFTLGAVLLDQEGQVANEERETPTTDSMPPLLRQAWELKVHQGAEPAFLFGLELIIAGLEKQLKRESGSHHHHHH

SEQ ID NO: 2098 - protein, 213 aa, Artificial Sequence
  synthetic construct; Sulfonylurea responsive repressor
MARLDKSKVINSALELLNEVGIEGLTTRKLAQKLGVEQPTLYWHVKNKRALLDALAIEMHDRHQTHYLPLEGESWQDFLRNFAKSMRRALLSHRDGAKVSLGTRWTEQQYETAENMLAFLTQQGFSLENALYATDAVRVFTLGAVLLDQEQQVAKEERETPTTDSMPPLLRQAWELKVHQGAEPAFLFGLELIIAGLEKQLKRESGSHHHHHH

SEQ ID NO: 2099 - protein, 213 aa, Artificial Sequence
  synthetic construct; Sulfonylurea responsive repressor
MARLDKSKVINSALELLNEVGIEGLTTRKLAQKLGVEQPTLYWHVKNKRALLDALAIEMMDRHQTHYLPLEGESWQDYLRNFAKSMRCALLSHRDGAKVSLGTRWTEQQYETAENMLAFLTQQGFSLENALYATDAVRVFTLGAVLLDQEGQVANEERETPTPDRMPPLLRQAWELKVHQGAEPAFLFGLELIIAGLEKQLKRESGSHHHHHH

SEQ ID NO: 2100 - protein, 213 aa, Artificial Sequence
  synthetic construct; Sulfonylurea responsive repressor
MARLDKSKVINSALELLNEVGIEGLTTRKLAQKLGVEQPTLYWHVKNKRALLDALAIEMMDRHQTHYLPLEGESWQDYLRNFAKSMRCALLSHRDGAKVALGTRWTEQQYETAENMLAFLTQQGFSLENALYATSAVRVFTLGAVLLDQEQQVAKEERETPTTDSMPPLLRQAWELKVHQGAEPAFLFGLELIIAGLEKQLKRESGSHHHHHH

SEQ ID NO: 2101 - protein, 213 aa, Artificial Sequence
  synthetic construct; Sulfonylurea responsive repressor
MARLDKSKVINSALELLNEVGIEGLTTRKLAQKLGVEQPTLYWHVKNKRALLDALAIEMMDRHQTHYLPLEGESWQDFLRNFAKSMRCALLSHRDGAKVALGTRWTEQQYETAENMLAFLTQQGFSLENALYATSAVRVFTLGAVLLDQEQQVAKEERETPTPDRMPPLLRQAWELKVHQGAEPAFLFGLELLIAGLEKQLKRESGSHHHHHH

SEQ ID NO: 2102 - protein, 213 aa, Artificial Sequence
  synthetic construct; Sulfonylurea responsive repressor
MARLDKSKVINSALELLNEVGIEGLTTRKLAQKLGVEQPTLYWHVKNKRALLDALAIEMHDRHQTHYLPLEGESWQDFLRNFAKSMRLALLSHRDGAKVSLGTRWTEQQYETAENMLAFLTQQGFSLENALYATDAVRVFTLGAVLLDQEQQVAKEERETPTPDSMPPLLRQAWELKVHQGAEPAFLFGLELIIAGLEKQLKRESGSHHHHHH

SEQ ID NO: 2103 - protein, 213 aa, Artificial Sequence
  synthetic construct; Sulfonylurea responsive repressor
MARLDKSKVINSALELLNEVGIEGLTTRKLAQKLGVEQPTLYWHVKNKRALLDALAIEMMDRHGTHYLPLEGESWQDFLRNYAKSMRRALLSHRDGAKVALGTRWTEQQYETAENMLACLTQQGFSLENALYATSAVRVFTLGAVLLDQEQQVANEERETPTTDSMPPLLRQAWELKVHQGAEPAFLFGLELIIAGLEKQLKRESGSHHHHHH

SEQ ID NO: 2104 - protein, 213 aa, Artificial Sequence
  synthetic construct; Sulfonylurea responsive repressor
MARLDKSKVINSALELLNEVGIEGLTTRKLAQKLGVEQPTLYWHVKNKRALLDALAIEMHDRHQTHYLPLEGESWQDFLRNFAKSMRRALLSHRDGAKIALGTRWTEQQYETAENMLAFLTQQGFSLENALYATDAVRVFTLGAVLLDQEQQVAKEERETPTPDSMPPLLRQAWELKDHQGAEPAFLFGLELIIAGLEKQLKRESGSHHHHHH

SEQ ID NO: 2105 - protein, 213 aa, Artificial Sequence
  synthetic construct; Sulfonylurea responsive repressor
MARLDKSKVINSALELLNEVGIEGLTTRKLAQKLGVEQPTLYWHVKNKRALLDALAIEMMDRHQTHYLPLEGESWQDYLRNFAKSMRCALLSHRDGAKVALGTRWTEQQYETAENMLAFLTQQGFSLENALYATSAVRVFTLGAVLLDQEQQVAKEERETPTPDRMPPLLRQAWELKVHQGAEPAFLFGLELIIAGLEKQLKRESGSHHHHHH

SEQ ID NO: 2106 - protein, 213 aa, Artificial Sequence
  synthetic construct; Sulfonylurea responsive repressor
MARLDKSKVINSALELLNEVGIEGLTTRKLAQKLGVEQPTLYWHVKNKRALLDALAIEMHDRHQTHYLPLEGESWQDYLRNFAKSMRCALLSHRDGAKVALGTRWTEQQYETAENMLAFLTQQGFSLENALYATSAVRVFTLGAVLLDQEGQVANEERETPTPDSMPPLLRQAWELKVHQGAEPAFLFGLELIIAGLEKQLKRESGSHHHHHH

SEQ ID NO: 2107 - protein, 213 aa, Artificial Sequence
  synthetic construct; Sulfonylurea responsive repressor
MARLDKSKVINSALELLNEVGIEGLTTRKLAQKLGVEQPTLYWHVKNKRALLDALAIEMHDRHQTHYLPLEGESWQDYLRNFAKSMRCALLSHRDGAKVSLGTRWTEQQYETAENMLAFLTQQGFSLENALYATSAVRVFTLGAVLLDQEQQVAKEERETPTPDRMPPLLRQAWELKVHQGAEPAFLFGLELIIAGLEKQLKRESGSHHHHHH

SEQ ID NO: 2108 - protein, 213 aa, Artificial Sequence
  synthetic construct; Sulfonylurea responsive repressor
MARLDKSKVINSALELLNEVGIEGLTTRKLAQKLGVEQPTLYWHVKNKRALLDALAIEMMDRHQTHYLPLEGESWQDFLRNFAKSMRCALLSHRDGAKVSLGTRWTEQQYETAENMLAFLTQQGFSLENALYATDAVRVFTLGAVLLDQEQQVAKEERETPTPDRMPPLLQQAWELKEHQGAEPAFLFGLELIIAGLEKQLKRDSGSHHHHHH

SEQ ID NO: 2109 - protein, 213 aa, Artificial Sequence
  synthetic construct; Sulfonylurea responsive repressor
MARLDKSKVINSALELLNEVGIEGLTTRKLAQKLGVEQPTLYWHVKNKRALLDALAIEMMDRHQTHYLPLEGESWQDYLRNFAKSMRCALLSHRDGAKVALGTRWTEQQYETAENMLAFLTQQGFSLENALYATSAVRVFTLGAVLLDQEQQVAKQERETPTPDSMPPLLRQAWELKVHQGAEPAFLFGLELIIAGLEKQLKRESGSHHHHHH

SEQ ID NO: 2110 - protein, 213 aa, Artificial Sequence
  synthetic construct; Sulfonylurea responsive repressor
MARLDKSKVINSALELLNEVGIEGLTTRKLAQKLGVEQPTLYWHVKNKRALLDALAIEMHDRHQTHYLPLEGESWQDFLRNFAKSMRRALLSHRDGAKVALGTRWTEQQYETAENMLAFLTQQGFSLENALYATSAVRVFTLGAVLLDQEGQVANEERETPTPDSMPPLLRQAWELKVHQGAEPAFLFGLELIIAGLEKQLKRESGSHHHHHH

SEQ ID NO: 2111 - DNA, 7454 bp, Artificial Sequence
  synthetic construct; plasmid pHD-
aattacaacggtatatatcctgtcagccaacaccaaaacaggcgcgcctcgggatcaggatcaggatctgcggccgcatcctgcaggtcgactctagaggatcctcatcgctatcaactttgtatagaaaagttgccataggattggggccagaatggcccgggggatcctctagagaaaatcttcgtcaacatggtggagcacgacacgcttgtctactccaaaaatatcaaagatacagtctcagaagaccaaagggcaattgagacttttcaacaaagggtaatatccggaaacctcctcggattccattgcccagctatctgtcactttattgtgaagatagtggaaaaggaaggtggctcctacaaatgccatcattgcgataaaggaaaggccatcgttgaagatgcctctgccgacagtggtcccaaagatggacccccacccacgaggagcatcgtggaaaaagaagacgttccaaccacgtcttcaaagcaagtggattgatgtgatatctccactgacgtaagggatgacgcacaatcccactagactctatcagtgatagagtgtatataagactctatcagtgatagagtgaactctatcagtgatagagttgtacttatttttacaacaattaccaacaacaacaaacaacaaacaacattacaattactatttacaattacaccatggccagactcgacaagagcaaggtgatcaacagcgcactggagctggggaacgaggtcggaatcgaaggcctcacaacccgtaagctcgcccagaagctcggggttgagcagcctacattgtactggcacgtcaagaacaagcgagctctgctagacgctatggccattgagatgttcgataggcacgccacccactactgtcctttggaaggggaaagctggcaagacttcttgaggaacaaggctaagtccatgagaaatgctttgctcagtcaccgtgatggagccaaggtcgctctaggtacgggcttcacggagcaacagtatgaaactgctgagaactgtcttgccttcctgacacaacaaggtttctcccttgagaacgccctctacgcatttcaagctgttgggatctacactctgggttgcgtcttgctggatcaagagctgcaagtcgctaaggaggagagggaaacacctactactgatagtatgccgccactggttcgacaagcttacgaactcaaagatcaccaaggtgcagagccagccttcctgttcggccttgaactgatcatatgtggattggagaagcagctgaagtgtgaaagtggatctggatccgtgagcaagggcgccgagctgttcaccggcatcgtgcccatcctgatcgagctgaatggcgatgtgaatggccacaagttcagcgtgagcggcgagggcgagggcgatgccacctacggcaagctgaccctgaagttcatctgcaccaccggcaagctgcctgtgccctggcccaccctggtgaccaccctgagctacggcgtgcagtgcttctcacgctaccccgatcacatgaagcagcacgacttcttcaagagcgccatgcctgagggctacatccaggagcgcaccatcttcttcgaggatgacggcaactacaagtcgcgcgccgaggtgaagttcgagggcgataccctggtgaatcgcatcgagctgaccggcaccgatttcaaggaggatggcaacatcctgggcaataagatggagtacaactacaacgcccacaatgtgtacatcatgaccgacaaggccaagaatggcatcaaggtgaacttcaagatccgccacaacatcgaggatggcagcgtgcagctggccgaccactaccagcagaatacccccatcggcgatggccctgtgctgctgcccgataaccactacctgtccacccagagcgccctgtccaaggaccccaacgagaagcgcgatcacatgatctacttcggcttcgtgaccgccgccgccatcacccacggcatggatgagctgtacaagtgaggtacctagatcttgttaactgagctcttttgtgatctgatgataagtggttggttcgtgtctcatgcacttgggaggtgatctatttcacctggtgtagtttgtgtttccgtcagttggaaaaacttatccctatcgatttcgttttcattttctgcttttcttttatgtaccttcgtttgggcttgtaacgggcctttgtatttcaactctcaataataatccaagtgcatgttaaacaatttgtcatctgtttcggctttgatatactactggtgaagatgggccgtactactgcatcacaacgaaaaataataataagatgaaaaacttgaagtggaaaaaaaaaaaaacttgaatgttcactactactcattgaccataatgtttaacatacatagctcaatagtatttttgtgaatatggcaacacaaacagtccaaaacaattgtctcttactataccaaaccaagggcgccgcttgtttgccactctttgtgtgcaatagtgtgattaccacatctccacattcaatatattccctgaattatctgacgattttgatggctcactgttttcccaagtcttgaattgtcttctgtgcgccagtcaaatgcatatgtgttgagtttatcttttaaatatcaagcttttgtttttaacttttgtttgtaaccaaaaactcacagtaggagtttgatcacataattttatgtttgcctttgcaatttctagtgagtctttgattaaaagcttgaaaagaaaatgcagccaagcttaccaagtaagttatgtgtattaaccagaggaagagagaatcttgcaaaatttcaacaaacacaaaaagaagtattactacgattggtggagaaagaaaacgattccaaatcttgaactgttgttgtaaaagcatagcagaaagtgggagacaaccgaaatagaaatgactataacttaatttaatgttatcattataatttcttctagcaaatatttagaaagtaaatatcacatcaacctttaatgtaattaagctttctctttttgattcatgtgagatgaaaagaaaaaaaagaagagaaaagtgtagaaaacacatcatttctaagctgaagggtcaccgaattcaggcctagaaggccatacaagtttgtacaaaaaagcaggctccggccagaatggcccggaccgggttaccgaattcgagctcggtaccctgggatccgatatcgatgggccctggccgaagcttggtcacccggtccgggcctagaaggccgatctcccgggcacccagctttcttgtacaaagtggccgttaacggccagaatggcccgcagatttaggtgacactatagaatatgcatcactagtaagctttgctctagatcaaactcacatccaaacataacatggatatcttccttaccaatcatactaattattttgggttaaatattaatcattatttttaagatattaattaagaaattaaaagattttttaaaaaaatgtataaaattatattattcatgatttttcatacatttgattttgataataaatatattttttttaatttcttaaaaaatgttgcaagacacttattagacatagtcttgttctgtttacaaaagcattcatcatttaatacattaaaaaatatttaatactaacagtagaatcttcttgtgagtggtgtgggagtaggcaacctggcattgaaacgagagaaagagagtcagaaccagaagacaaataaaaagtatgcaacaaacaaatcaaaatcaaagggcaaaggctggggttggctcaattggttgctacattcaattttcaactcagtcaacggttgagattcactctgacttccccaatctaagccgcggatgcaaacggttgaatctaacccacaatccaatctcgttacttaggggcttttccgtcattaactcacccctgccacccggtttccctataaattggaactcaatgctcccctctaaactcgtatcgcttcagagttgagaccaagacacactcgttcatatatctctctgctcttctcttctcttctacctctcaaggtacttttcttctccctctaccaaatcctagattccgtggttcaatttcggatcttgcacttctggtttgctttgccttgctttttcctcaactgggtccatctaggatccatgtgaaactctactctttctttaatatctgcggaatacgcgtttgactttcagatctagtcgaaatcatttcataattgcctttctttcttttagcttatgagaaataaaatcactttttttttatttcaaaataaaccttgggccttgtgctgactgagatggggtttggtgattacagaattttagcgaattttgtaattgtacttgtttgtctgtagttttgttttgttttcttgtttctcatacattccttaggcttcaattttattcgagtataggtcacaataggaattcaaactttgagcaggggaattaatcccttccttcaaatccagtttgtttgtatatatgtttaaaaaatgaaacttttgctttaaattctattataactttttttatggctgaaatttttgcatgtgtctttgctctctgttgtaaatttactgtttaggtactaactctaggcttgttgtgcagtttttgaagtataaccatgccacacaacacaatggcggccaccgcttccagaaccacccgattctcttcttcctcttcacaccccaccttccccaaacgcattactagatccaccctccctctctctcatcaaaccctcaccaaacccaaccacgctctcaaaatcaaatgttccatctccaaaccccccacggcggcgcccttcaccaaggaagcgccgaccacggagcccttcgtgtcacggttcgcctccggcgaacctcgcaagggcgcggacatccttgtggaggcgctggagaggcagggcgtgacgacggtgttcgcgtaccccggcggtgcgtcgatggagatccaccaggcgctcacgcgctccgccgccatccgcaacgtgctcccgcgccacgagcagggcggcgtcttcgccgccgaaggctacgcgcgttcctccggcctccccggcgtctgcattgccacctccggccccggcgccaccaacctcgtgagcggcctcgccgacgctttaatggacagcgtcccagtcgtcgccatcaccggccaggtcgcccgccggatgatcggcaccgacgccttccaagaaaccccgatcgtggaggtgagcagatccatcacgaagcacaactacctcatcctcgacgtcgacgacatcccccgcgtcgtcgccgaggctttcttcgtcgccacctccggccgccccggtccggtcctcatcgacattcccaaagacgttcagcagcaactcgccgtgcctaattgggacgagcccgttaacctccccggttacctcgccaggctgcccaggccccccgccgaggcccaattggaacacattgtcagactcatcatggaggcccaaaagcccgttctctacgtcggcggtggcagtttgaattccagtgctgaattgaggcgctttgttgaactcactggtattcccgttgctagcactttaatgggtcttggaacttttcctattggtgatgaatattcccttcagatgctgggtatgcatggtactgtttatgctaactatgctgttgacaatagtgatttgttgcttgcctttggggtaaggtttgatgaccgtgttactgggaagcttgaggcttttgctagtagggctaagattgttcacattgatattgattctgccgagattgggaagaacaagcaggcgcacgtgtcggtttgcgcggatttgaagttggccttgaagggaattaatatgattttggaggagaaaggagtggagggtaagtttgatcttggaggttggagagaagagattaatgtgcagaaacacaagtttccattgggttacaagacattccaggacgcgatttctccgcagcatgctatcgaggttcttgatgagttgactaatggagatgctattgttagtactggggttgggcagcatcaaatgtgggctgcgcagttttacaagtacaagagaccgaggcagtggttgacctcagggggtcttggagccatgggttttggattgcctgcggctattggtgctgctgttgctaaccctggggctgttgtggttgacattgatggggatggtagtttcatcatgaatgttcaggagttggccactataagagtggagaatctcccagttaagatattgttgttgaacaatcagcatttgggtatggtggttcagttggaggataggttctacaagtccaatagagctcacacctatcttggagatccgtctagcgagagcgagatattcccaaacatgctcaagtttgctgatgcttgtgggataccggcagcgcgagtgacgaagaaggaagagcttagagcggcaattcagagaatgttggacacccctggcccctaccttcttgatgtcattgtgccccatcaggagcatgtgttgccgatgattcccagtaatggatccttcaaggatgtgataactgagggtgatggtagaacgaggtactgattgcctagaccaaatgttccttgatgcttgttttgtacaatatatataagataatgctgtcctagttgcaggatttggcctgtggtgagcatcatagtctgtagtagttttggtagcaagacattttattttccttttatttaacttactacatgcagtagcatctatctatctctgtagtctgatatctcctgttgtctgtattgtgccgttggattttttgctgtagtgagactgaaaatgatgtgctagtaataatatttctgttagaaatctaagtagagaatctgttgaagaagtcaaaagctaatggaatcaggttacatattcaatgtttttctttttttagcggttggtagacgtgtagattcaacttctcttggagctcacctaggcaatcagtaaaatgcatattccttttttaacttgccatttatttacttttagtggaaattgtgaccaatttgttcatgtagaacggatttggaccattgcgtccacaaaacgtctcttttgctcgatcttcacaaagcgataccgaaatccagagatagttttcaaaagtcagaaatggcaaagttataaatagtaaaacagaatagatgctgtaatcgacttcaataacaagtggcatcacgtttctagttctagacccatcagctggcctagaaggcccgggcaactttattatacaaagttgatagattgggcgcgccgaattcatttacaattgaatatatcctgcc

SEQ ID NO: 2112 - DNA, 9488 bp, Artificial Sequence
  synthetic construct; plasmid pHD-
aattacaacggtatatatcctgtcagccaacaccaaaacaggcgcgcctcgggatcaggatcaggatctgcggccgcatcctgcaggtcgactctagaggatcctcatcgctatcaactttgtatagaaaagttgccataggattggggccagaatggcccgggggatcctctagagaaaatcttcgtcaacatggtggagcacgacacgcttgtctactccaaaaatatcaaagatacagtctcagaagaccaaagggcaattgagacttttcaacaaagggtaatatccggaaacctcctcggattccattgcccagctatctgtcactttattgtgaagatagtggaaaaggaaggtggctcctacaaatgccatcattgcgataaaggaaaggccatcgttgaagatgcctctgccgacagtggtcccaaagatggacccccacccacgaggagcatcgtggaaaaagaagacgttccaaccacgtcttcaaagcaagtggattgatgtgatatctccactgacgtaagggatgacgcacaatcccactagactctatcagtgatagagtgtatataagactctatcagtgatagagtgaactctatcagtgatagagttgtacttatttttacaacaattaccaacaacaacaaacaacaaacaacattacaattactatttacaattacaccatggccagactcgacaagagcaaggtgatcaacagcgcactggagctggggaacgaggtcggaatcgaaggcctcacaacccgtaagctcgcccagaagctcggggttgagcagcctacattgtactggcacgtcaagaacaagcgagctctgctagacgctatggccattgagatgttcgataggcacgccacccactactgtcctttggaaggggaaagctggcaagacttcttgaggaacaaggctaagtccatgagaaatgctttgctcagtcaccgtgatggagccaaggtcgctctaggtacgggcttcacggagcaacagtatgaaactgctgagaactgtcttgccttcctgacacaacaaggtttctcccttgagaacgccctctacgcatttcaagctgttgggatctacactctgggttgcgtcttgctggatcaagagctgcaagtcgctaaggaggagagggaaacacctactactgatagtatgccgccactggttcgacaagcttacgaactcaaagatcaccaaggtgcagagccagccttcctgttcggccttgaactgatcatatgtggattggagaagcagctgaagtgtgaaagtggatctggatccgtgagcaagggcgccgagctgttcaccggcatcgtgcccatcctgatcgagctgaatggcgatgtgaatggccacaagttcagcgtgagcggcgagggcgagggcgatgccacctacggcaagctgaccctgaagttcatctgcaccaccggcaagctgcctgtgccctggcccaccctggtgaccaccctgagctacggcgtgcagtgcttctcacgctaccccgatcacatgaagcagcacgacttcttcaagagcgccatgcctgagggctacatccaggagcgcaccatcttcttcgaggatgacggcaactacaagtcgcgcgccgaggtgaagttcgagggcgataccctggtgaatcgcatcgagctgaccggcaccgatttcaaggaggatggcaacatcctgggcaataagatggagtacaactacaacgcccacaatgtgtacatcatgaccgacaaggccaagaatggcatcaaggtgaacttcaagatccgccacaacatcgaggatggcagcgtgcagctggccgaccactaccagcagaatacccccatcggcgatggccctgtgctgctgcccgataaccactacctgtccacccagagcgccctgtccaaggaccccaacgagaagcgcgatcacatgatctacttcggcttcgtgaccgccgccgccatcacccacggcatggatgagctgtacaagtgaggtacctagatcttgttaactgagctcttttgtgatctgatgataagtggttggttcgtgtctcatgcacttgggaggtgatctatttcacctggtgtagtttgtgtttccgtcagttggaaaaacttatccctatcgatttcgttttcattttctgcttttcttttatgtaccttcgtttgggcttgtaacgggcctttgtatttcaactctcaataataatccaagtgcatgttaaacaatttgtcatctgtttcggctttgatatactactggtgaagatgggccgtactactgcatcacaacgaaaaataataataagatgaaaaacttgaagtggaaaaaaaaaaaaacttgaatgttcactactactcattgaccataatgtttaacatacatagctcaatagtatttttgtgaatatggcaacacaaacagtccaaaacaattgtctcttactataccaaaccaagggcgccgcttgtttgccactctttgtgtgcaatagtgtgattaccacatctccacattcaatatattccctgaattatctgacgattttgatggctcactgttttcccaagtcttgaattgtcttctgtgcgccagtcaaatgcatatgtgttgagtttatcttttaaatatcaagcttttgtttttaacttttgtttgtaaccaaaaactcacagtaggagtttgatcacataattttatgtttgcctttgcaatttctagtgagtctttgattaaaagcttgaaaagaaaatgcagccaagcttaccaagtaagttatgtgtattaaccagaggaagagagaatcttgcaaaatttcaacaaacacaaaaagaagtattactacgattggtggagaaagaaaacgattccaaatcttgaactgttgttgtaaaagcatagcagaaagtgggagacaaccgaaatagaaatgactataacttaatttaatgttatcattataatttcttctagcaaatatttagaaagtaaatatcacatcaacctttaatgtaattaagctttctctttttgattcatgtgagatgaaaagaaaaaaaagaagagaaaagtgtagaaaacacatcatttctaagctgaagggtcaccgaattcaggcctagaaggccatacaagtttgtacaaaaaagcaggctccataggattggggccagaatggcccgggggatcctctagagaaaatcttcgtcaacatggtggagcacgacacgcttgtctactccaaaaatatcaaagatacagtctcagaagaccaaagggcaattgagacttttcaacaaagggtaatatccggaaacctcctcggattccattgcccagctatctgtcactttattgtgaagatagtggaaaaggaaggtggctcctacaaatgccatcattgcgataaaggaaaggccatcgttgaagatgcctctgccgacagtggtcccaaagatggacccccacccacgaggagcatcgtggaaaaagaagacgttccaaccacgtcttcaaagcaagtggattgatgtgatatctccactgacgtaagggatgacgcacaatcccactagactctatcagtgatagagtgtatataagactctatcagtgatagagtgaactctatcagtgatagagttgtacttatttttacaacaattaccaacaacaacaaacaacaaacaacattacaattactatttacaattacaccatggccagactcgacaagagcaaggtgatcaacagcgcactggagctgctgaacgaggtcggaatcgaaggcctcacaacccgtaagctcgcccagaagctcggggttgagcagcctacattgtactggcacgtcaagaacaagcgagctctgctagacgctatggccattgagatgttcgataggcacgccacccactactgtcctttggaaggggaaagctggcaagacttcttgaggaacaaggctaagtccatgagaaatgctttgctcagtcaccgtgatggagccaaggtcgctctaggtacgggcttcacggagcaacagtatgaaactgctgagaactgtcttgccttcctgacacaacaaggtttctcccttgagaacgccctctacgcatttcaagctgttgggatctacactctgggttgcgtcttgctggatcaagagctgcaagtcgctaaggaggagagggaaacacctactactgatagtatgccgccactggttcgacaagcttacgaactcaaagatcaccaaggtgcagagccagccttcctgttcggccttgaactgatcatatgtggattggagaagcagctgaagtgtgaaagtggatcttaatgatagctgcagaaggtacctgttaactgcgcgcgagctcaaacttatctctgttatgaatcagaagaagttcatgtctcgtttcatttaaaactttggtggtttgtgttttggggccttgtaaagcccctgatgaataattgttcaactatgtttccgttcctgtgttatacctttctttctaatgagtaatgacatcaaacttcttctgtattgaaattatgtccttgtgagtctctttatcatcgtttcgtctttacattatatgtgctacttttgtctaatgagcctgaaaagtggctccaatggtacgcactggaagatttgttggcttctggtagatatagcgacagtgttgagcttgtaatatcatgtctcttattgctaaattagttcctttcttaacagaaaccttcaaagtttttgtttttgttttcatttacctaatgtacacatacgctggccatgactaacaacatgtccaggcttagagcatatttttttctagcttaaattgttaacttgtcattcagtaaaatccgagaattgtgaagctctaattgaagctaattcgttttataaagtcagttaaaaagtatactaaattatccaacttttcttcaaaatctcaaaattctatgacaaaacgatagtctttgtttatgtcagtaccacaaagaggtggaaaaaaacaccaaaaaaacaataagcaaactatacactgagaagaaaaataaaagagagcttaatagatgttttatactaacggtagattagatcaaagatccaagctatactctacatagagcagaacccagaatcccttcatatctcttttattctagcaccgataatctactgaaaagaagacacttagagctttgtctctttgtcaaagaagtcccagccgtcatccagaagctccttacgttcattaacagaggtcaccgaattcaggcctagaaggccacccagctttcttgtacaaagtggccgttaacggccagaatggcccgcagatttaggtgacactatagaatatgcatcactagtaagctttgctctagatcaaactcacatccaaacataacatggatatcttccttaccaatcatactaattattttgggttaaatattaatcattatttttaagatattaattaagaaattaaaagattttttaaaaaaatgtataaaattatattattcatgatttttcatacatttgattttgataataaatatattttttttaatttcttaaaaaatgttgcaagacacttattagacatagtcttgttctgtttacaaaagcattcatcatttaatacattaaaaaatatttaatactaacagtagaatcttcttgtgagtggtgtgggagtaggcaacctggcattgaaacgagagaaagagagtcagaaccagaagacaaataaaaagtatgcaacaaacaaatcaaaatcaaagggcaaaggctggggttggctcaattggttgctacattcaattttcaactcagtcaacggttgagattcactctgacttccccaatctaagccgcggatgcaaacggttgaatctaacccacaatccaatctcgttacttaggggcttttccgtcattaactcacccctgccacccggtttccctataaattggaactcaatgctcccctctaaactcgtatcgcttcagagttgagaccaagacacactcgttcatatatctctctgctcttctcttctcttctacctctcaaggtacttttcttctccctctaccaaatcctagattccgtggttcaatttcggatcttgcacttctggtttgctttgccttgctttttcctcaactgggtccatctaggatccatgtgaaactctactctttctttaatatctgcggaatacgcgtttgactttcagatctagtcgaaatcatttcataattgcctttctttcttttagcttatgagaaataaaatcactttttttttatttcaaaataaaccttgggccttgtgctgactgagatggggtttggtgattacagaattttagcgaattttgtaattgtacttgtttgtctgtagttttgttttgttttcttgtttctcatacattccttaggcttcaattttattcgagtataggtcacaataggaattcaaactttgagcaggggaattaatcccttccttcaaatccagtttgtttgtatatatgtttaaaaaatgaaacttttgctttaaattctattataactttttttatggctgaaatttttgcatgtgtctttgctctctgttgtaaatttactgtttaggtactaactctaggcttgttgtgcagtttttgaagtataaccatgccacacaacacaatggcggccaccgcttccagaaccacccgattctcttcttcctcttcacaccccaccttccccaaacgcattactagatccaccctccctctctctcatcaaaccctcaccaaacccaaccacgctctcaaaatcaaatgttccatctccaaaccccccacggcggcgcccttcaccaaggaagcgccgaccacggagcccttcgtgtcacggttcgcctccggcgaacctcgcaagggcgcggacatccttgtggaggcgctggagaggcagggcgtgacgacggtgttcgcgtaccccggcggtgcgtcgatggagatccaccaggcgctcacgcgctccgccgccatccgcaacgtgctcccgcgccacgagcagggcggcgtcttcgccgccgaaggctacgcgcgttcctccggcctccccggcgtctgcattgccacctccggccccggcgccaccaacctcgtgagcggcctcgccgacgctttaatggacagcgtcccagtcgtcgccatcaccggccaggtcgcccgccggatgatcggcaccgacgccttccaagaaaccccgatcgtggaggtgagcagatccatcacgaagcacaactacctcatcctcgacgtcgacgacatcccccgcgtcgtcgccgaggctttcttcgtcgccacctccggccgccccggtccggtcctcatcgacattcccaaagacgttcagcagcaactcgccgtgcctaattgggacgagcccgttaacctccccggttacctcgccaggctgcccaggccccccgccgaggcccaattggaacacattgtcagactcatcatggaggcccaaaagcccgttctctacgtcggcggtggcagtttgaattccagtgctgaattgaggcgctttgttgaactcactggtattcccgttgctagcactttaatgggtcttggaacttttcctattggtgatgaatattcccttcagatgctgggtatgcatggtactgtttatgctaactatgctgttgacaatagtgatttgttgcttgcctttggggtaaggtttgatgaccgtgttactgggaagcttgaggcttttgctagtagggctaagattgttcacattgatattgattctgccgagattgggaagaacaagcaggcgcacgtgtcggtttgcgcggatttgaagttggccttgaagggaattaatatgattttggaggagaaaggagtggagggtaagtttgatcttggaggttggagagaagagattaatgtgcagaaacacaagtttccattgggttacaagacattccaggacgcgatttctccgcagcatgctatcgaggttcttgatgagttgactaatggagatgctattgttagtactggggttgggcagcatcaaatgtgggctgcgcagttttacaagtacaagagaccgaggcagtggttgacctcagggggtcttggagccatgggttttggattgcctgcggctattggtgctgctgttgctaaccctggggctgttgtggttgacattgatggggatggtagtttcatcatgaatgttcaggagttggccactataagagtggagaatctcccagttaagatattgttgttgaacaatcagcatttgggtatggtggttcagttggaggataggttctacaagtccaatagagctcacacctatcttggagatccgtctagcgagagcgagatattcccaaacatgctcaagtttgctgatgcttgtgggataccggcagcgcgagtgacgaagaaggaagagcttagagcggcaattcagagaatgttggacacccctggcccctaccttcttgatgtcattgtgccccatcaggagcatgtgttgccgatgattcccagtaatggatccttcaaggatgtgataactgagggtgatggtagaacgaggtactgattgcctagaccaaatgttccttgatgcttgttttgtacaatatatataagataatgctgtcctagttgcaggatttggcctgtggtgagcatcatagtctgtagtagttttggtagcaagacattttattttccttttatttaacttactacatgcagtagcatctatctatctctgtagtctgatatctcctgttgtctgtattgtgccgttggattttttgctgtagtgagactgaaaatgatgtgctagtaataatatttctgttagaaatctaagtagagaatctgttgaagaagtcaaaagctaatggaatcaggttacatattcaatgtttttctttttttagcggttggtagacgtgtagattcaacttctcttggagctcacctaggcaatcagtaaaatgcatattccttttttaacttgccatttatttacttttagtggaaattgtgaccaatttgttcatgtagaacggatttggaccattgcgtccacaaaacgtctcttttgctcgatcttcacaaagcgataccgaaatccagagatagttttcaaaagtcagaaatggcaaagttataaatagtaaaacagaatagatgctgtaatcgacttcaataacaagtggcatcacgtttctagttctagacccatcagctggcctagaaggcccgggcaactttattatacaaagttgatagattgggcgcgccgaattcatttacaattgaatatatcctgcc

SEQ ID NO: 2113 - DNA, 34 bp, Artificial Sequence
  synthetic construct; primer
  misc_feature (16)..(17): n is a, c, g, or t
gcctgggaactcaaannkcaccaaggtgcagagc

SEQ ID NO: 2114 - DNA, 34 bp, Artificial Sequence
  synthetic construct; primer
  misc_feature (18)..(19): n is a, c, g, or t
gctctgcaccttggtgmnntttgagttcccaggc

SEQ ID NO: 2115 - protein, 5 aa, Artificial Sequence
  synthetic construct; fragment of TetR clone
ADEKR

SEQ ID NO: 2116 - protein, 6 aa, Artificial Sequence
  synthetic construct; fragment of TetR clone
PRKQRT

SEQ ID NO: 2117 - protein, 6 aa, Artificial Sequence
  synthetic construct; fragment of TetR clone
DNKNRW

SEQ ID NO: 2118 - protein, 4 aa, Artificial Sequence
  synthetic construct; fragment of TetR clone
IVWF

SEQ ID NO: 2119 - protein, 4 aa, Artificial Sequence
  synthetic construct; fragment of TetR clone
AMQS

SEQ ID NO: 2120 - protein, 4 aa, Artificial Sequence
  synthetic construct; fragment of TetR clone
KNSW

SEQ ID NO: 2121 - protein, 4 aa, Artificial Sequence
  synthetic construct; fragment of TetR clone
FMNR

SEQ ID NO: 2122 - protein, 4 aa, Artificial Sequence
  synthetic construct; fragment of TetR clone
WASC

SEQ ID NO: 2123 - protein, 4 aa, Artificial Sequence
  synthetic construct; fragment of TetR clone
LRKM

SEQ ID NO: 2124 - protein, 4 aa, Artificial Sequence
  synthetic construct; fragment of TetR clone
FILY

SEQ ID NO: 2125 - protein, 4 aa, Artificial Sequence
  synthetic construct; fragment of TetR clone
FIVY

SEQ ID NO: 2126 - protein, 4 aa, Artificial Sequence
  synthetic construct; fragment of TetR clone
KRQL

SEQ ID NO: 2127 - protein, 4 aa, Artificial Sequence
  synthetic construct; fragment of TetR clone
AFNS

SEQ ID NO: 2128 - protein, 4 aa, Artificial Sequence
  synthetic construct; fragment of TetR clone
SRAC

SEQ ID NO: 2129 - protein, 6 aa, Artificial Sequence
  synthetic construct; fragment of TetR clone
MLQILV

SEQ ID NO: 2130 - protein, 4 aa, Artificial Sequence
  synthetic construct; fragment of TetR clone
NLIV

SEQ ID NO: 2131 - protein, 7 aa, Artificial Sequence
  synthetic construct; fragment of TetR clone
WFYILMC

SEQ ID NO: 2132 - protein, 4 aa, Artificial Sequence
  synthetic construct; fragment of TetR clone
WMVC

SEQ ID NO: 2133 - protein, 4 aa, Artificial Sequence
  synthetic construct; fragment of TetR clone
LWFY

SEQ ID NO: 2134 - protein, 9 aa, Artificial Sequence
  synthetic construct; fragment of TetR clone
ACDEKQRST

SEQ ID NO: 2135 - protein, 8 aa, Artificial Sequence
  synthetic construct; fragment of TetR clone
LGKCRFWV

SEQ ID NO: 2136 - DNA, 34 bp, Artificial Sequence; identical to SEQ ID NO: 2113
  synthetic construct; primer
  misc_feature (16)..(17): n is a, c, g, or t

SEQ ID NO: 2137 - DNA, 34 bp, Artificial Sequence; identical to SEQ ID NO: 2114
  synthetic construct; primer
  misc_feature (18)..(19): n is a, c, g, or t
